(19) United States
(12) Patent Application Publication
(10) Pub. No.: US 2021/0060185 A1
(43) Pub. Date: Mar. 4, 2021

(54) PROTEASE SENSITIVE GVPC AND RELATED GAS VESICLE GENE CLUSTERS, EXPRESSION SYSTEMS, CONSTRUCTS, VECTORS, GENETIC CIRCUITS, CELLS, COMPOSITIONS, METHODS AND SYSTEMS FOR CONTRAST-ENHANCED IMAGING

(71) Applicant: California Institute of Technology, Pasadena, CA (US)

(72) Inventors: Anupama LAKSHMANAN, Pasadena, CA (US); Mikhail SHAPIRO, Pasadena, CA (US); Suchita P. NETY, Cambridge, MA (US); Zhiyang JIN, Pasadena, CA (US)

(21) Appl. No.: 17/006,591

(22) Filed: Aug. 28, 2020

Related U.S. Application Data
(60) Provisional application No. 62/892,672, filed on Aug. 28, 2019.

(51) Int. Cl. A61K 49/22; C07K 14/195; C12Q 1/37

(52) U.S. Cl. CPC A61K 49/223; C07K 2319/50; C12Q 1/37; C07K 14/195

(57) ABSTRACT

Provided herein are engineered protease sensitive gas vesicles and related engineered protease genetically GvpC constructs, vectors, gas vesicles gene clusters, genetic circuits, cells, compositions, methods and systems, which in several embodiments can be used together with contrast-enhanced imaging technique, to detect and report protease activity and related biological events in an imaging target site.

### CROSS REFERENCE TO RELATED APPLICATIONS

[0001] The present application claims priority to U.S. Provisional Application No. 62/892,672, entitled “Acoustic Biosensors” filed on Aug. 28, 2019, with docket number CIT 8336, which is incorporated herein by reference in its entirety.

### STATEMENT OF GOVERNMENT GRANT

[0002] This invention was made with government support under Grant No. EB018975 awarded by the National Institutes of Health and under Grant No. W911NF-14-1-0111 awarded by the Army. The government has certain rights in the invention.

### FIELD

[0003] The present disclosure relates to engineered proteins of gas-filled structures, and in particular to a gas vesicle protein GvpC genetically engineered to be protease sensitive. More particularly the present disclosure relates to a protease sensitive GvpC and related gas vesicles, expression systems, constructs, vectors, gene clusters, genetic circuits, cells, compositions, methods and systems to produce gas filled structures and/or to image protease associated biological events in a target site.

### BACKGROUND

[0004] Proteases are enzymes involved in a several biological events in various organisms from blood-clotting to apoptosis pathways.

[0005] Reporting of protease associated events, and biological events in general, is however currently primarily based on fluorescent reporter genes.

[0006] Accordingly, reporting protease associated events in deep tissues, at nanomolar concentrations and/or producing dynamic contrast in response to local molecular signals remains challenging.

### SUMMARY

[0007] Provided herein is a protease sensitive gas vesicle protein GVPC genetically engineered to be protease sensitive and related protease sensitive gas vesicles (GVs), constructs, vectors, gas vesicle gene clusters, genetic circuits, cells, compositions, methods and systems, which in several embodiments can be used together with contrast-enhanced imaging technique, to detect and report protease activity and related biological events in an imaging target site.

[0008] According to a first aspect, a method to provide a protease sensitive Gas Vesicle is described, as well as a protease sensitive Gas Vesicles obtained thereby and related protease sensitive GvpC protein. The method comprises providing one or more engineered Gas Vesicles each comprising a gas enclosed by a protein shell comprising a Gas vesicle GvpA/B protein and an engineered GvpC protein.

[0009] In the method, the engineered GvpC is a gas vesicle protein comprising multiple repeat regions within a central portion of the GvpC flanked by an N-terminal region having an N-terminus and a C-terminal region having a C-terminus. The engineered gas vesicle protein GvpC, further comprises at least one protease recognition site inserted within the central portion and/or attached to at least one of the N-terminus and the C-terminus of the GvpC.

[0010] In the method each Gas Vesicle having, prior to exposure to a protease, an initial GV collapse pressure and an initial ultrasound response up to collapse, the initial ultrasound response having a baseline non linearity.

[0011] The method further comprises contacting the one or more engineered Gas Vesicles with a protease to allow cleavage of the protease recognition site of the engineered GvpC and detecting a protease induced GV collapse pressure and/or a protease induced GV ultrasound response of the one or more engineered Gas Vesicles following the contacting. The method also comprises selecting following the contacting the one or more engineered Gas Vesicles having a detected protease induced GV collapse pressure lower than the initial Gv collapse pressure and/or a protease induced ultrasound response having a non linearity increased with respect the baseline non-linearity, the selecting performed to provide a protease sensitive Gas Vesicle.

[0012] According to a second aspect, an engineered protease sensitive gas vesicle is described. The engineered protease sensitive gas vesicle comprises a gas enclosed by a protein shell in which a Gas vesicle GvpA/B protein and an engineered protease sensitive GvpC protein of the instant disclosure are arranged in a configuration in which the engineered protease sensitive GvpC protein binds the Gas vesicle GvpA/B protein to form the protein shell, the at least one protease recognition site is presented on the protein shell of the engineered protease sensitive gas vesicle.

[0013] In the engineered protease sensitive gas vesicle, the Gas Vesicle has an initial GV collapse pressure, an initial ultrasound response with a baseline non-linearity, a protease induced GV collapse pressure lower than the initial GV collapse pressure and a protease induced ultrasound response having an enhanced nonlinearity with respect to the initial ultrasound response. In the engineered protease sensitive gas vesicle, the protease induced GV collapse pressure and the protease induced ultrasound contrast signal are detected following processing of the at least one protease recognition site by a corresponding protease.

[0014] According to a third aspect, an engineered protease sensitive gas vesicle protein GvpC is described and a polynucleotide encoding therefor. The engineered protease sensitive GvpC is a gas vesicle protein comprising multiple repeat regions within a central portion of the GvpC flanked by an N-terminal region having an N-terminus and a C-terminal region having a C-terminus. The engineered gas vesicle protein GvpC, further comprises at least one protease recognition site inserted within the central portion and/or attached to at least one of the N-terminus and the C-terminus of the GvpC. In the engineered protease sensitive gas vesicle protein GvpC, the central portion, the N-terminal region and the C-terminal region are configured to bind Gas vesicle GvpA/B protein of a Gas Vesicle to form a Gas Vesicle protein shell and to present the at least one protease recognition site on the Gas Vesicle protein shell upon assembly.

[0015] In the engineered protease sensitive GvpC, the multiple repeat region, N-terminal region, C-terminal region and protease recognition site are in a configuration associated upon assembly of the engineered protease sensitive GvpC in a GV having an initial GV collapse pressure of the GV, an initial ultrasound response having a baseline non-linearity, a protease induced GV collapse pressure lower than the initial GV collapse pressure and a protease induced ultrasound response having an increased nonlinearity with respect the baseline non-linearity. In the engineered protease sensitive gas vesicle, the protease induced GV collapse pressure and the protease induced ultrasound response are detected following processing of the at least one protease recognition site by a corresponding protease.

[0016] According to a fourth aspect, protease sensitive Gas Vesicle Gene Cluster (GVGC) encoding for a protease sensitive gas vesicle of the present disclosure is described. The protease sensitive Gas Vesicle Gene Cluster (GVGC) comprises gas vesicle assembly (GVA) genes and gas vesicle structural (GVS) genes configured to form a GV type in a host cell, the GVS genes of the protease sensitive GVGC comprising Gas vesicle GvpA/B protein a genetically engineered protease sensitive gvpC gene encoding for a protease sensitive GvpC protein of the instant disclosure configured to bind the Gas vesicle GvpA/B protein and to present the at least one protease recognition site on the Gas Vesicle type upon assembly.

[0017] According to a fifth aspect, a method and a system are described to detect a protease and/or image a protease associated biochemical event in a host cell comprised in an imaging target site, the method comprising:
[0018] expressing a protease sensitive Gas Vesicle in the host cell; and
[0019] imaging the target site comprising the host cell by applying an ultrasound to obtain a nonlinear ultrasound image of the target site to image the protease associated chemical event.

[0020] The system to detect a protease and/or image a protease associated biochemical event in a host cell comprises a protease sensitive gvpC gene expression cassette herein described, a genetically engineered protease sensitive Gas Vesicle expression system (GVES), and/or a host cell in a combination with a device configured to apply ultrasound for simultaneous combined or sequential use in the imaging method to detect a protease and/or image a protease associated biochemical event in a host cell herein described.

[0021] According to a sixth aspect, a method and system are described to detect a protease and/or image a protease associated event in a target site, the method comprising:
[0022] introducing into the target site, a protease sensitive Gas Vesicle herein described and/or an engineered protease sensitive host cell configured for expression of a protease sensitive Gas Vesicle herein described, the introducing performed under conditions resulting in presence of protease sensitive gas vesicles herein described in a target site of the host organism; and
[0023] imaging the target site comprising the protease sensitive Gas Vesicle herein described and/or an engineered protease sensitive host cell by applying ultrasound to obtain a nonlinear ultrasound image of the target site. In preferred embodiments the target site is a tissue or an organ within a host organism.

[0024] The system to detect a protease and/or image a protease associated event in a target site, comprises the engineered protease sensitive Gas Vesicle herein described, and/or an engineered protease sensitive cell in a combination with a device configured to apply ultrasound for simultaneous combined or sequential use in the methods to image a protease an/or a protease associated event in a target site herein described.

[0025] Additional aspects comprise methods and systems to provide a protease sensitive GvpC, methods and systems to provide a protease sensitive Gas Vesicles and related expression cassettes, expression systems, vectors, genetically engineered protease sensitive GV host cells, compositions, methods and systems as will be understood by a skilled person upon reading of the present disclosure.

[0026] The protease sensitive gas vesicle protein GvpC and related Gas Vesicle, Gas Vesicle Gene Cluster (GVGC), gene cassettes, expression systems, vectors, cells, compositions, methods and systems herein described, can be used in several embodiments for reporting protease dependent biochemical events in a prokaryotic or eukaryotic cell in vitro, or in vivo, in particular using ultrasound imaging techniques a widely available techniques with high resolution and deep tissue penetration.

[0027] In several embodiments described herein, The protease sensitive gas vesicle protein GvpC and related Gas Vesicle, Gas Vesicle Gene Cluster (GVGC), gene cassettes, expression systems, vectors, cells, compositions, methods and systems herein described, can be used to report the location of a protease associated biological event within an imaging target site, and/or sense and report one or more biochemical events in prokaryotic or eukaryotic cells configured to express one or more protease sensitive GV types within an imaging target site.

[0028] The protease sensitive gas vesicle protein GvpC and related Gas Vesicle, Gas Vesicle Gene Cluster (GVGC), gene cassettes, expression systems, vectors, cells, compositions, methods and systems herein described, can be used in several embodiments to produce dynamic contrast in response to local protease associated molecular signals.

[0029] The protease sensitive gas vesicle protein GvpC and related Gas Vesicle, Gas Vesicle Gene Cluster (GVGC), gene cassettes expression systems, vectors, cells, compositions, methods and systems herein described, can be used in several embodiments to track over time and/or space protease associated biological events in target sites such as prokaryotic and/or eukaryotic cells, as well as tissues and organs within the body of an individual or other environments.

[0030] The protease sensitive gas vesicle protein GvpC and related Gas Vesicle, Gas Vesicle Gene Cluster (GVGC), gene cassettes expression systems, vectors, cells, compositions, methods and systems herein described, can be used in connection with various applications wherein reporting of protease activity and/or a protease associated biological events in a target site is desired. For example, the protease sensitive gas vesicle protein GvpC and related Gas Vesicle, Gas Vesicle Gene Cluster (GVGC), gene cassettes expression systems, vectors, cells, compositions, methods and systems herein described, can be used for visualization of biological events, such as cellular signaling, homeostasis, cellular migration, responses to external stimuli such as temperature and pH, onset of disease pathologies, and responses to drug treatments and therapy facilitating development of diagnostic and therapeutic cellular agents, among other advantages identifiable by a skilled person, in medical applications, as well diagnostics applications.

[0031] Additional exemplary applications include uses of the protease sensitive gas vesicle protein GvpC and related Gas Vesicle, Gas Vesicle Gene Cluster (GVGC), gene cassettes expression systems, vectors, cells, compositions, methods and systems herein described, in several fields including basic biology research, applied biology, bio-engineering, bio-energy, medical research, medical diagnostics, therapeutics, and in additional fields identifiable by a skilled person upon reading of the present disclosure.

[0032] The details of one or more embodiments of the disclosure are set forth in the accompanying drawings and the description below. Other features, objects, and advantages will be apparent from the description and drawings, and from the claims.

### BRIEF DESCRIPTION OF THE DRAWINGS

[0033] The accompanying drawings, which are incorporated into and constitute a part of this specification, illustrate one or more embodiments of the present disclosure and, together with the detailed description and example sections, serve to explain the principles and implementations of the disclosure. Exemplary embodiments of the present disclosure will become more fully understood from the detailed description and the accompanying drawings, wherein:

[0034] FIG. 1 shows an exemplary schematic representation of a Gas vesicles herein described. In particular FIG. 1 shows a rendition of a GVs showing GVS proteins forming the primary GV shell and in particular GvpA ribs (1) (gray) the outer scaffold protein GvpC (2) (black dark rectangles).

[0035] FIG. 2 shows amino acid GvpC sequences from 5 different organisms with the tandem repeat regions (Rep) within each gvpC protein aligned, preceded by the N-terminal region (N-term) and followed by the C-terminal region (C-term). Sequences and tandem repeats were obtained from Uniprot. In particular, FIG. 2 Panel a shows repeat sequence of GvpC from Halobacterium salinarum, FIG. 2 Panel b shows repeat sequence of GvpC from Anabaena flos-aquae, FIG. 2 Panel a shows repeat sequence of GvpC from Halobacterium mediterranei, FIG. 2 Panel d shows repeat sequence of GvpC from Microchaete diplosiphon, and FIG. 2 Panel e shows repeat sequence of GvpC from Nostoc sp.

[0036] FIG. 3 shows exemplary sequence alignment of GvpC repeat regions from different organisms. In particular, FIG. 3 Panel a shows repeat sequences of GvpC from Halobacterium salinarum, FIG. 3 Panel b shows repeat sequences of GvpC from Haloferax mediterranei, FIG. 3 Panel c shows repeat sequences of GvpC from Anabaena flos-aquae, FIG. 3 Panel d shows repeat sequences of GvpC from Microchaete diplosiphon, FIG. 3 Panel e shows repeat sequences of GvpC from shows Nostoc sp. FIG. 3 Panel f shows repeat sequences of GvpC from shows Microcystic aeruginosa, FIG. 3 Panel g shows repeat sequences of GvpC from shows a sequence alignment of the consensus sequences from Halobacterium salinarum and Haloferax mediterranei, FIG. 3 Panel h shows a sequence alignment of the consensus sequences from Anabaena flos-aquae, Microchaete diplosiphon and Nostoc sp.

[0037] FIG. 4 shows an exemplary schematic representation of a, GvpC protein and of protease sensitive GvpC herein described. In particular the schematic illustration of FIG. 4 panel A, shows a schematic representation of the structure of a GvpC with an N-terminal region (vertical stripes), the C-terminal region (horizontal stripes) flanking a Repeats region comprising repeat sequences (gray boxes) as indicated. In the illustration of FIG. 4 Panel B the exemplary structural schematic of FIG. 4 Panel A is shown further comprising an endoprotease cleavage site (white box) within a repeat sequence (gray boxes) and an exoprotease specific degradation tag (black box) at the C-terminus of the GvpC thus providing an exemplary protease sensitive GvpC according to the instant disclosure. FIG. 4 Panel C shows a schematic representation of the exemplary structural schematic of FIG. 4 Panel A wherein the insertion points of the protease recognition sites are indicated with arrows.

[0038] FIG. 5 shows a cartoon showing an exemplary embodiment of a method to provide a protease sensitive GV herein described.

[0039] FIG. 6 shows a cartoon showing an exemplary embodiment of a method to provide a protease sensitive GvpC herein described.

[0040] FIGS. 7A-7G illustrate an exemplary acoustic biosensor of TEV endopeptidase activity. FIG. 7A shows a Top: schematic of a gas vesicle (GV), including the primary shell protein GvpA (gray) and the reinforcing protein GvpC (blue). Bottom: schematic of GvpC structure, comprising five 33-amino acid repeats flanked by N- and C-terminal regions. FIG. 7B shows a schematic of GVS_{TEV}. FIG. 7C shows normalized OD₅₀₀ₙₘ of GVS_{TEV} as a function of hydrostatic pressure, after incubation with active TEV or heat-inactivated TEV (dTEV). The legend lists the midpoint collapse pressure for each condition (±95% confidence interval) determined from fitting a Boltzmann sigmoid function (N≥3 biological replicates). FIG. 7D shows Coomassie-stained SDS-PAGE gel of OD₅₀₀ₙₘ-matched samples of GVS_{TEV} incubated with dTEV or active TEV protease, before and after buoyancy purification (labeled pre b.p. and post b.p., respectively) FIG. 7E shows representative TEM images of GVS_{TEV} after incubation with dTEV or active TEV protease. FIG. 7F shows DLS measurements of the average hydrodynamic diameter of GVS_{TEV} and GV_{WT} samples after protease incubation (N=3 biological replicates for GVS_{TEV} and 4 for GV_{WT}; individual dots represent each N, and thick horizontal line indicates the mean). FIG. 7G shows representative ultrasound images of agarose phantoms containing GVS_{TEV} incubated with TEV or dTEV protease at OD₅₀₀ₙₘ. 2.2. The linear (B-mode) image was acquired at 132 kPa and the nonlinear (x-AM) image was acquired at 438 kPa. FIG. 7H shows Average ratio of x-AM to B-mode ultrasound signal as a function of applied acoustic pressure for GVS_{TEV}, after incubation with TEV or dTEV protease (N=3 biological replicates, with each N consisting of 2-3 technical replicates). FIG. 7I shows hydrostatic collapse pressure measurements for engineered Ana GVs with WT-GvpC (GV_{WT}) after protease incubation (N≥3 biological replicates). FIG. 7J shows representative ultrasound images of agarose phantoms containing GV_{WT} incubated with TEV or dTEV protease at OD₅₀₀ₙₘ. 2.2. The B-mode image was acquired at 132 kPa and the x-AM image at 569 kPa. FIG. 7K shows an average ratio of x-AM to B-mode ultrasound signal as a function of applied acoustic pressure for GV_{WT}, after incubation with TEV or dTEV protease (N=3 biological replicates, with each N consisting of 3 technical replicates). For ultrasound images in FIG. 7G and FIG. 7J, CNR stands for contrast-to-noise-ratio, and color bars represent relative ultrasound signal intensity on the dB scale. Error bars indicate SEM. Scale bars in e represent 100 nm. Scale bars in FIG. 7G and FIG. 7J represent 1 mm.

[0041] FIG. 8A-8K illustrates an exemplary acoustic biosensor of calcium-activated calpain protease. FIG. 8A shows a schematic illustration GVS_{calp}. FIG. 8B shows hydrostatic collapse curves of GVS_{calp} after incubations in the presence or absence of calpain and calcium. The legend lists the midpoint collapse pressure for each condition (±95% confidence interval) determined from fitting a Boltzmann sigmoid function (N≥5 biological replicates). FIG. 8C shows a Coomassie-stained SDS-PAGE gel of OD₅₀₀ₙₘ-matched samples of GVS_{calp} incubated in the presence (+) or absence (−) of calpain (first +/−) and calcium (second +/−), before and after buoyancy purification (labeled pre b.p. and post b.p. respectively). FIG. 8D shows representative TEM images of GVS_{calp} after incubations in the presence or absence of calpain and/or calcium. Scale bars represent 100 nm. FIGS. 8E, 8G, 8I show representative ultrasound images of agarose phantoms containing GVS_{calp} incubated with and without calpain and/or calcium at OD₅₀₀ₙₘ. 2.2. The B-mode images were taken at 132 kPa for FIGS. 8E, 8G and 8I, and the x-AM images were taken at 438 kPa for FIGS. 8E and 8G and at 425 kPa for FIG. 8I. CNR stands for contrast-to-noise-ratio, and color bars represent relative ultrasound signal intensity on the dB scale. Scale bars represent 1 mm FIGS. 8F, 8H, 8J show an average ratio of x-AM to B-mode ultrasound signal as a function of applied acoustic pressure for GVS_{calp} after incubation in the presence or absence of calpain and/or calcium (N=3 biological replicates, with each N consisting of 2 technical replicates). FIG. 8K shows a calcium-response curve for GVS_{calp} in the presence of μ-calpain, showing the ratio of x-AM to B-mode ultrasound signal at 425 kPa as a function of calcium concentration. The mean values are fitted to a Hill equation with a coefficient of 1, giving a half maximum response concentration (EC₅₀) of 140 μm (N=3 biological replicates, individual dots represent the mean values with the solid blue line showing the fitted curve). Error bars indicate SEM.

[0042] FIGS. 9A-9H illustrate an exemplary acoustic biosensor of ClpXP protease. FIG. 9A shows a schematic of GVS_{ClpXP}. FIG. 9B shows a Coomassie-stained SDS-PAGE gel of OD₅₀₀ₙₘ-matched GVS_{ClpXP} samples, incubated in a reconstituted cell-free transcription-translation (TX-TL) system containing a protease inhibitor cocktail or ClpXP. FIG. 9C shows representative TEM images of GVS_{ClpXP} after incubations in the presence of a protease inhibitor or ClpXP. FIG. 9D shows normalized optical density (OD₅₀₀ₙₘ) measurements of GVS_{ClpXP} as a function of hydrostatic pressure after protease incubation. The legend lists the midpoint collapse pressure for each condition (±95% confidence interval) determined from fitting a Boltzmann sigmoid function (N=5 biological replicates). FIG. 9E shows representative ultrasound images of agarose phantoms containing GVS_{ClpXP} incubated with the inhibitor cocktail or active ClpXP at OD₅₀₀ₙₘ 2.2. FIG. 9F shows a diagram showing average x-AM/B-mode ratio as a function of applied acoustic pressure for GVS_{ClpXP}, after incubation with the protease inhibitor or active ClpXP. FIG. 9G shows hydrostatic collapse pressure measurements for engineered Ana GVs with WT-GvpC (GV_{WT}) after protease incubation (N=3 biological replicates) FIG. 9H shows Representative ultrasound images of agarose phantoms containing GV_{WT} incubated with the inhibitor cocktail or active ClpXP at OD₅₀₀ₙₘ 2.2. FIG. 9I shows a diagram plotting average ratio of x-AM (nonlinear) to B-mode (linear) acoustic signal as a function of applied acoustic pressure for GV_{WT} after incubation with the inhibitor cocktail or ClpXP protease. For ultrasound images in FIG. 9E and FIG. 9H, CNR stands for contrast-to-noise-ratio, and color bars represent relative ultrasound signal intensity on the dB scale. The B-mode images were acquired at 132 kPa and the x-AM images were acquired at 477 kPa. For FIG. 9F and FIG. 9I, N=3 biological replicates, with each N having 3 technical replicates. Error bars indicate SEM. Scale bars in c represent 100 nm. Scale bars in For FIG. 9E and FIG. 9H, represent 1 mm.

[0043] FIGS. 10A-10J illustrate intracellular protease activity and circuit-driven gene expression in engineered cells. FIG. 10A shows a schematic of E. coli Nissle cells expressing the acoustic sensor gene construct for ClpXP. In some cases, the Nissle cells are genomically modified to lack the ClpX and ClpP⁻ genes (ΔClpXP), and co-transformed with a plasmid encoding L-arabinose (L-ara) driven ClpXP. FIG. 10B shows a normalized pressure-sensitive optical density at 600 nm of WT Nissle cells expressing either ARG_{WT} or ASG_{ClpXP}. The legend lists the midpoint collapse pressure for each cell type (±95% confidence interval) determined from fitting a Boltzmann sigmoid function (N≥3 biological replicates). FIG. 10C shows representative ultrasound images of WT Nissle cells expressing either ARG_{WT} or ASG_{ClpXP} at OD₆₀₀ₙₘ 1.5 (N=3 biological replicates, with each N having 3 technical replicates). FIG. 10D shows average x-AM/B-mode ratio as a function of applied acoustic pressure for FIG. 10E WT Nissle cells expressing either ARG_{WT} or ASG_{ClpXP} at OD₆₀₀ₙₘ 1.5 (N=3 biological replicates, with each N having 3 technical replicates). Normalized pressure-sensitive optical density at 600 nm of ΔClpXP Nissle cells expressing ASG_{ClpXP} with or without L-ara induction of ClpXP expression. The legend lists the midpoint collapse pressure for each cell type (±95% confidence interval) determined from fitting a Boltzmann sigmoid function (N≥3 biological replicates). FIG. 10F shows representative ultrasound images of ΔClpXP Nissle cells expressing ASG_{ClpXP} with or without L-ara induction of ClpXP expression at OD₆₀₀ₙₘ 1.5 (N=3 biological replicates, with each N having 3 technical replicates). FIG. 10G shows a diagram plotting average x-AM/B-mode ratio as a function of applied acoustic pressure for ΔClpXP Nissle cells expressing ASG_{ClpXP} with or without L-ara induction of ClpXP expression at OD₆₀₀ₙₘ 1.5 (N=3 biological replicates, with each N having 3 technical replicates). FIG. 10H shows a schematic of pT5-LacO driven ASG_{ClpXP} and pTet-TetO driven WT GvpC gene circuits co-transformed into Nissle cells for dynamic switching of nonlinear acoustic signals from the intracellular GV sensors in response to circuit-driven gene expression. FIG. 10I shows representative ultrasound images of Nissle cells (OD₆₀₀ₙₘ nm 1) expressing ASG_{ClpXP}, with or without aTc induction to drive expression of WT GvpC. FIG. 10J shows average x-AM/B-mode ratio as a function of applied acoustic pressure for Nissle cells expressing ASG_{ClpXP}, with or without aTc induction (N=5 biological replicates). For ultrasound images in FIGS. 10C, 10F, and 10I, CNR stands for contrast-to-noise-ratio. and color bars represent relative ultrasound signal intensity in the dB scale. The B-mode images were acquired at 132 kPa for FIGS. 10C and 10I and 309 kPa for FIG. 10F. The x-AM images were acquired at 1.11 MPa for FIG. 10C, 1.61 MPa for FIG. 10F, and 1.34 MPa for FIG. 10I. Error bars indicate SEM. Scale bars in FIGS. 10C, 10F, and 101 represent 1 mm.

[0044] FIG. 11 illustrates ultrasound imaging of bacteria expressing acoustic sensor genes in the gastrointestinal tract of mice. (Panel a) Schematic illustrating the in vivo ultrasound imaging experiment. (Panel b) Transverse ultrasound image of a mouse whose colon contains WT Nissle cells expressing ARG_{WT} at the center of the lumen and the same strain expressing ASG_{ClpXP} at the periphery of the lumen. (Panel c) B-mode and xAM contrast-to-noise ratio (CNR) in vivo, for WT Nissle cells expressing ARG_{WT} or ASG_{ClpXP}. N=9 mice. P<0.0001 for x-AM signal from cells expressing ASG_{ClpXP} versus the ARG_{WT} control. (Panel d) Transverse ultrasound image of a mouse whose colon contains ΔClpXP Nissle cells expressing ASG_{ClpXP} with L-ara induction of ClpXP expression at the center and without L-ara induction at the periphery of the lumen. Cells are injected in agarose gel at a final concentration of 1.5E9 cells ml⁻¹ for (Panel b) and (Panel d). Nonlinear (x-AM) images of the colon, acquired at 1.27 MPa for (Panel b) and 1.56 MPa for (Panel d) before and after acoustic collapse (hot color map), are superimposed on linear (B-mode) anatomical images (bone colormap). Color bars represent relative ultrasound signal intensity on the dB scale. Scale bars represent 2 mm. (Panel e) B-mode and xAM CNR in vivo, for ΔClpXP Nissle cells expressing ASG_{ClpXP} with or without L-ara induction of ClpXP expression. N=7 mice. P<0.0001 for x-AM signal from cells expressing ASG_{ClpXP} with ClpXP expression induced versus non-induced. Individual dots represent each N, and the thick horizontal line indicates the mean. Error bars indicate SEM.

[0045] FIG. 12A shows Coomassie-stained SDS-PAGE gel of OD₅₀₀ₙₘ-matched samples of GV_{WT} incubated with dTEV and TEV protease, before and after buoyancy purification (labeled pre b.p. and post b.p., respectively).

[0046] FIGS. 12B-12C show scatter plots representing the ratio of nonlinear (x-AM) to linear (B-mode) ultrasound signal as a function of applied acoustic pressure for all the replicate samples used in the x-AM voltage ramp imaging experiments for GVS_{TEV} (FIG. 12B) and for GV_{WT} (FIG. 12C). Total number of replicates is 8 for GV_{TEV} and 9 for GV_{WT}. Solid line represents the mean of all the replicates.

[0047] FIGS. 13A-13C shows scatter plots each representing the ratio of nonlinear (x-AM) to linear (B-mode) ultrasound signal as a function of applied acoustic pressure for all the GVS_{calp} replicate samples after incubation in the presence or absence of calpain and/or calcium. Total number of replicates is 6 for GVS_{calp}.

[0048] FIG. 13D represents the DLS measurements showing the average hydrodynamic diameter of GVS_{calp} and GV_{WT} samples after calpain/calcium incubations (N≥2 biological replicates, individual dots represent each N and horizontal line indicates the mean). Error bars indicate SEM.

[0049] FIGS. 14A-14C shows representative ultrasound images of agarose phantoms containing GV_{WT} incubated in the presence (+) or absence (−) of calpain (first +/−) and calcium (second +/−), at OD₅₀₀ₙₘ 2.2. The B-mode images were taken at 132 kPa for FIGS. 14A-14C and the x-AM images corresponding to the maximum difference in nonlinear contrast between the +calpain/+ calcium sample and the negative controls were taken at 438 kPa for FIGS. 14A-14B and at 425 kPa for FIG. 14C. CNR stands for contrast-to-noise-ratio and color bars represent ultrasound signal intensity in the dB scale. Scale bars represent 1 mm.

[0050] FIGS. 14D-14F represent scatter plots showing the ratio of x-AM to B-mode ultrasound signal as a function of increasing acoustic pressure for GV_{WT} after incubation in the presence or absence of calpain and/or calcium (N=2).

[0051] FIG. 14G plots hydrostatic collapse curves of GV_{WT} after incubations in the presence (+) or absence (−) of calpain and/or calcium. The legend lists the midpoint collapse pressure for each condition (±95% confidence interval) determined from fitting a Boltzmann sigmoid function (N≥5 biological replicates).

[0052] FIG. 14H shows the results of Coomassie-stained SDS-PAGE gel of OD₅₀₀ₙₘ matched samples of GV_{WT} incubated in the presence (+) or absence (−) of calpain/calcium, before and after buoyancy purification (labeled pre b.p. and post b.p., respectively).

[0053] FIG. 15A shows the results of Coomassie-stained SDS-PAGE gel of OD₅₀₀ₙₘ matched GV_{WT} samples incubated in a reconstituted cell-free transcription-translation (TX-TL) system containing a protease inhibitor cocktail or ClpXP.

[0054] FIG. 15B shows the results Coomassie-stained SDS-PAGE gel of 30× diluted content of TX-TL system containing ClpXP.

[0055] FIG. 15C represents DLS measurements showing the average hydrodynamic diameter of GVS_{ClpXP} and GV_{WT} samples, after incubations with protease inhibitor or ClpXP (N=2 biological replicates, individual dots represent each N and horizontal line indicates the mean, error bars indicate SEM).

[0056] FIGS. 15D-15E represent scatter plots showing the ratio of x-AM to B-mode acoustic signal as a function of applied acoustic pressure for all the replicate samples used in the x-AM voltage ramp experiments for GVS_{ClpXP} (FIG. 15D) and GV_{WT} (FIG. 15E). Total number of replicates is 9 for GVS_{ClpXP} and GV_{WT}.

[0057] FIG. 16 represents scatter plots showing the ratio of x-AM to B-mode acoustic signal as a function of acoustic pressure for all the replicate samples used in the x-AM voltage ramp experiments for WT Nissle cells expressing either ARG_{WT} or ASG_{ClpXP} (Panel a), ΔClpXP Nissle cells expressing ASG_{ClpXP} and araBAD driven ClpXP, with or without L-arabinose induction (Panel b) and WT Nissle cells expressing ASG_{ClpXP} and pTet-TetO driven WT GvpC, with or without aTc induction (Panel c). Total number of replicates is 9 for Panel a and 5 for Panel b.

[0058] FIG. 17 shows the ultrasound imaging of bacteria expressing acoustic sensor genes in the gastrointestinal tract of mice. (Panel a) Schematic illustrating two orientations of the wild type (WT) E. coli Nissle cells expressing ARG_{WT} or ASG_{ClpXP} introduced into the mouse colon as a hydrogel. (Panels b, c) Representative transverse ultrasound images of the colon for two mice used in the in vivo imaging experiments, with orientation #1 (Panel b) and with orientation #2. (Panel c). Cells are injected at a final concentration of 1.5E9 cells ml⁻¹. B-mode signal is displayed using the bone colormap and x-AM signal is shown using the hot colormap. Color bars represent B-mode and x-AM ultrasound signal intensity in the dB scale. Scale bars represent 2 mm. (Panels d, e) B-mode and xAM contrast-to-noise ratio (CNR) in vivo, for WT Nissle cells expressing ARG_{WT} or ASG_{ClpXP} in orientation #1 (Panel d) and orientation #2. (Panel e). N=5 mice for orientation #1 and N=4 mice for orientation #2. P=0.0014 for x-AM signal from cells expressing ASG_{ClpXP} versus the ARG_{WT} control in orientation #1, and P=0.0016 for that in orientation #2. (Panel f) B-mode and xAM contrast-to-tis sue ratio (CTR) in vivo, for WT Nissle cells expressing ARG_{WT} or ASG_{ClpXP} in both orientations. P<0.0001 for the CTR from xAM imaging of cells expressing ASG_{ClpXP} versus CTR from xAM imaging of cells expressing ARG_{WT}, B-mode imaging of cells expressing ASG_{ClpXP} and ARG_{WT}. Individual dots represent each N, and the thick horizontal line indicates the mean. Error bars indicate SEM.

[0059] FIG. 18 shows an absence of memory effect from imaging at sequentially increasing acoustic pressure. Ratio of sensor-specific signal (xAM/B-mode) acquired at the indicated acoustic pressures in the process of voltage ramping (comprising 36 points from 458 kPa to 1.6 MPa) or stepping the transducer output directly to corresponding pressure in a single step, for WT Nissle cells expressing either ARG_{WT} or ASG_{ClpXP}. N=3 biological replicates, with each N having 3 technical replicates. Individual dots represent each replicate, and the thick horizontal line indicates the mean. Error bars indicate SEM.

[0060] FIG. 19 shows an exemplary Clustal omega alignment of amino acid sequences of selected exemplary gvpA and gvpB proteins (SEQ ID NOs: 7-10 and 529-544).

[0061] FIG. 20 shows exemplary phylogenetic relationships of the gvpA protein sequences from the indicated prokaryotic species. [1]

[0062] FIG. 21 shows exemplary phylogenetic relationships of the gvpF and gvpL protein sequences from the indicated prokaryotic species. [1]

[0063] FIG. 22 shows exemplary phylogenetic relationships of the gvpN protein sequences from the indicated prokaryotic species. [1]

[0064] FIG. 23 shows diagrams illustrating the organization of exemplary gas vesicle gene clusters. Gas vesicle gene clusters from the indicated organisms are shown, with genes shown as block-shaped arrows, and genes of predicted similar function indicated in the same shade of grey. The direction of the transcription of genes within a gene cluster is indicated by the direction of the block-shaped arrows, and genes grouped together having block arrows pointed in the same direction are typically organized in the same operon. The scale bar indicates 1 kb. [1]

[0065] FIG. 24 shows diagrams illustrating organization of exemplary gyp gene clusters, wherein each letter indicates a gyp gene, and an arrow beneath a group of letters indicates an operon, with the direction of the arrow indicating the direction of transcription. [2]

[0066] FIG. 25 shows an example flowchart for a method to use differential imaging (nonlinear) of protease-sensitive GvpC GVs to determine the presence of a protease.

[0067] FIG. 26 shows an example flowchart for a method to test the buckling pressure of a GV type.

### DETAILED DESCRIPTION

[0068] Provided herein are protease sensitive genetically engineered gas vesicle gene clusters (GVGC), and related gas vesicles (GVs), genetic circuits, vectors, genetically engineered prokaryotic cells, compositions, methods and systems.

[0069] The wordings “gas vesicles”, GV″, “gas vesicles protein structure”, or “GVPS”, refer to a gas-filled protein structure natively intracellularly expressed by certain bacteria or archaea as a mechanism to regulate cellular buoyancy in aqueous environments [3]. In particular, gas vesicles are protein structures natively expressed almost exclusively in microorganisms from aquatic habitats, to provide buoyancy by lowering the density of the cells [3]. GVs have been found in over 150 species of prokaryotes, comprising cyanobacteria and bacteria other than cyanobacteria [4, 5], from at least 5 of the 11 phyla of bacteria and 2 of the phyla of archaea described by Woese (1987) [6]. Exemplary microorganisms expressing or carrying gas vesicle protein structures and/or related genes include cyanobacteria such as Microcystis aeruginosa, Aphanizomenon flos aquae Oscillatoria agardhii, Anabaena, Microchaete diplosiphon and Nostoc; phototropic bacteria such as Amoebobacter, T hiodiclyon, Pelodiclyon, and Ancalochloris; non phototropic bacteria such as Microcyclus aquaticus; Gram-positive bacteria such as Bacillus megaterium Gram-negative bacteria such as Serratia; and archaea such as Haloferax mediterranei, Methanosarcina barkeri, and Halobacteria salinarium, as well as additional microorganisms identifiable by a skilled person.

[0070] In particular, a GV in the sense of the disclosure is an intracellularly expressed structure forming a hollow structure wherein a gas is enclosed by a protein shell, which is a shell substantially made of protein (at least 95% protein). In gas vesicles in the sense of the disclosure, the protein shell is formed by a plurality of proteins herein also indicated as GV proteins or gyps, which form in the cytoplasm a gas permeable and liquid impermeable protein shell configuration encircling gas. Accordingly, a protein shell of a GV is permeable to gas but not to surrounding liquid such as water. In particular, GV protein shells exclude water but permit gas to freely diffuse in and out from the surrounding media [7] making them physically stable despite their usual nanometer size, unlike microbubbles, which trap pre-loaded gas in an unstable configuration.

[0071] GV structures are typically nanostructures with widths and lengths of nanometer dimensions (in particular with widths of 45-250 nm and lengths of 100-800 nm) but can have lengths up to 2 μm in prokaryotes but can have larger dimensions such as up to 8-10 as will be understood by a skilled person upon reading of the present disclosure. In certain embodiments, the gas vesicles protein structure have average dimensions of 1000 nm or less, such as 900 nm or less, including 800 nm or less, or 700 nm or less, or 600 nm or less, or 500 nm or less, or 400 nm or less, or 300 nm or less, or 250 nm or less, or 200 nm or less, or 150 nm or less, or 100 nm or less, or 75 nm or less, or 50 nm or less, or 25 nm or less, or 10 nm or less. For example, the average diameter of the gas vesicles may range from 10 nm to 1000 nm, such as 25 nm to 500 nm, including 50 nm to 250 nm, or 100 nm to 250 nm. By “average” is meant the arithmetic mean.

[0072] GVs in the sense of the disclosure have different shapes depending on their genetic origins [7]. For example, GVs in the sense of the disclosure can be substantially spherical, ellipsoid, cylindrical, or have other shapes such as football shape or cylindrical with cone shaped end portions depending on the type of bacteria providing the gas vesicles.

[0073] Representative examples of endogenously expressed GVs native to bacterial or archaeal species are the gas vesicle protein structure produced by the Cyanobacterium Anabaena flos-aquae (Ana GVs) [3], and the Halobacterium Halobacterium salinarum (Halo GVs) [8]. In particular, Ana GVs are cone-tipped cylindrical structures with a diameter of approximately 140 nm and length of up to 2 μm and in particular 200-800 nm or longer. Halo GVs are typically spindle-like structures with a maximal diameter of approximately 250 nm and length of 250-600 nm.

[0074] In bacteria or archaea expressing GVs, the genes (herein also gyp genes) encoding for the proteins forming the GVs (herein also GV proteins), are organized in a gas vesicle gene cluster of 8 to 14 different genes depending on the host bacteria or archaea, as will be understood by a skilled person.

[0075] The term “Gas Vesicle Genes Cluster” or “GVGC” as described herein indicates a gene cluster encoding a set of GV proteins capable of providing a GV upon expression within a bacterial or archaeal cell Since the ability of expressed GV proteins to assemble in a GV depends on the cell environment where GV proteins are expressed and a same group of gyp genes may or may not form a GV upon expression in a cell, gyp genes provide GVGCs in a cell dependent manner as will be understood by a skilled person (see on point U.S. application Ser. No. 15/663,635 published as US 2018/0030501 incorporated herein by reference).

[0076] The term “gene cluster” as used herein means a group of two or more genes found within an organism's DNA that encode two or more polypeptides or proteins, which collectively share a generalized function or are genetically regulated together to produce a cellular structure and are often located within a few thousand base pairs of each other. The size of gene clusters can vary significantly, from a few genes to several hundred genes [9]. Portions of the DNA sequence of each gene within a gene cluster are sometimes found to be similar or identical; however, the resulting protein of each gene is distinctive from the resulting protein of another gene within the cluster. Genes found in a gene cluster can be observed near one another on the same chromosome or native plasmid DNA, or on different, but homologous chromosomes. An example of a gene cluster is the Hox gene, which is made up of eight genes and is part of the Homeobox gene family. In the sense of the disclosure, gene clusters as described herein also comprise gas vesicle gene clusters, wherein the expressed proteins thereof together are able to form gas vesicles.

[0077] The term “gene” as used herein indicates a polynucleotide encoding for a protein that in some instances can take the form of a unit of genomic DNA within a bacteria, plant, or other organism. The term gene as used herein incudes naturally occurring polynucleotide encoding for a protein as well as engineered polynucleotide whose sequences have been modified from the original sequence for example to optimize expression, e.g. through codon changes (see Examples section) and/or through introduction of modified N- and/or C-terminal modifications, while still maintaining the ability to encode for the protein encoded by the naturally occurring polynucleotide or a or a functional variant thereof.

[0078] The term “polynucleotide” as used herein indicates an organic polymer composed of two or more monomers including nucleotides, nucleosides or analogs thereof. The term “nucleotide” refers to any of several compounds that consist of a ribose or deoxyribose sugar joined to a purine or pyrimidine base and to a phosphate group and that are the basic structural units of nucleic acids. The term “nucleoside” refers to a compound (as guanosine or adenosine) that consists of a purine or pyrimidine base combined with deoxyribose or ribose and is found especially in nucleic acids. The term “nucleotide analog” or “nucleoside analog” refers respectively to a nucleotide or nucleoside in which one or more individual atoms have been replaced with a different atom or a with a different functional group. Accordingly, the term polynucleotide includes nucleic acids of any length, and in particular DNA RNA analogs and fragments thereof.

[0079] The term “protein” as used herein indicates a polypeptide with a particular secondary and tertiary structure that can interact with another molecule and in particular, with other biomolecules including other proteins, DNA, RNA, lipids, metabolites, hormones, chemokines, and/or small molecules. The term “polypeptide” as used herein indicates an organic linear, circular, or branched polymer composed of two or more amino acid monomers and/or analogs thereof. The term “polypeptide” includes amino acid polymers of any length including full-length proteins and peptides, as well as analogs and fragments thereof. A polypeptide of three or more amino acids is also called a protein oligomer, peptide, or oligopeptide. In particular, the terms “peptide” and “oligopeptide” usually indicate a polypeptide with less than 100 amino acid monomers. In particular, in a protein, the polypeptide provides the primary structure of the protein, wherein the term “primary structure” of a protein refers to the sequence of amino acids in the polypeptide chain covalently linked to form the polypeptide polymer. A protein “sequence” indicates the order of the amino acids that form the primary structure. Covalent bonds between amino acids within the primary structure can include peptide bonds or disulfide bonds, and additional bonds identifiable by a skilled person. Polypeptides in the sense of the present disclosure are usually composed of a linear chain of alpha-amino acid residues covalently linked by peptide bond or a synthetic covalent linkage. The two ends of the linear polypeptide chain encompassing the terminal residues and the adjacent segment are referred to as the carboxyl terminus (C-terminus) and the amino terminus (N-terminus) based on the nature of the free group on each extremity. Unless otherwise indicated, counting of residues in a polypeptide is performed from the N-terminal end (NH₂-group), which is the end where the amino group is not involved in a peptide bond to the C-terminal end (—COOH group) which is the end where a COOH group is not involved in a peptide bond. Proteins and polypeptides can be identified by x-ray crystallography, direct sequencing, immunoprecipitation, and a variety of other methods as understood by a person skilled in the art. Proteins can be provided in vitro or in vivo by several methods identifiable by a skilled person. In some instances where the proteins are synthetic proteins in at least a portion of the polymer two or more amino acid monomers and/or analogs thereof are joined through chemically-mediated condensation of an organic acid (—COOH) and an amine (—NH₂) to form an amide bond or a “peptide” bond.

[0080] As used herein the term “amino acid”, “amino acid monomer”, or “amino acid residue” refers to organic compounds composed of amine and carboxylic acid functional groups, along with a side-chain specific to each amino acid. In particular, alpha- or α-amino acid refers to organic compounds composed of amine (—NH₂) and carboxylic acid (—COOH), and a side-chain specific to each amino acid connected to an alpha carbon. Different amino acids have different side chains and have distinctive characteristics, such as charge, polarity, aromaticity, reduction potential, hydrophobicity, and pKa. Amino acids can be covalently linked to form a polymer through peptide bonds by reactions between the amine group of a first amino acid and the carboxylic acid group of a second amino acid. Amino acid in the sense of the disclosure refers to any of the twenty naturally occurring amino acids, non-natural amino acids, and includes both D an L optical isomers.

[0081] In embodiments herein described identification of a gene cluster encoding GV proteins naturally expressed in bacteria or archaea as described herein can be performed for example by isolating the GVs from the bacteria or archaea, isolating the protein for the protein shell of the GV and deriving the related amino acidic sequence with methods and techniques identifiable by a skilled person (see e.g. procedures described in [10] [11]). The sequence of the genes encoding for the GV proteins can then be identified by methods and techniques identifiable by a skilled person. For example, gas vesicle gene clusters can also be identified by persons skilled in the art by performing gene sequencing or partial- or whole-genome sequencing of organisms using wet lab and in silico molecular biology techniques known to those skilled in the art. As understood by those skilled in the art, gas vesicle gene clusters can be located on the chromosomal DNA or native plasmid DNA of microorganisms. After performing DNA or cDNA isolation from a microorganism, the polynucleotide sequences or fragments thereof or PCR-amplified fragments thereof can be sequenced using DNA sequencing methods such as Sanger sequencing, DNASeq, RNASeq, whole genome sequencing, and other methods known in the art using commercially available DNA sequencing reagents and equipment, and then the DNA sequences analyzed using computer programs for DNA sequence analysis known to skilled persons.

[0082] In embodiments herein described, identification of a gene cluster encoding for GV proteins [8, 12, 13] can also be performed by screening DNA sequence databases such as GenBank, EMBL, DNA Data Bank of Japan, and others. Gas vesicle gene cluster gene sequences in databases such as those above can be searched using tools such as NCBI Nucleotide BLAST and the like, for gas vesicle gene sequences and homologs thereof, using gene sequence query methods known to those skilled in the art. For example, genes of the gene cluster for the exemplary haloarchael GVs (which have the largest number of different gyp genes) and their predicted function and features are illustrated in Example 26 of related U.S. application Ser. No. 15/613,104, filed on Jun. 2, 2017 which is incorporated herein by reference in its entirety. GV gene clusters can also be identified using a combination of genomic vicinity (e.g. antiSMASH), protein homology and prior GV gene annotation as will be understood by a skilled person.

[0083] In embodiments herein described, identification of a GVGC configured to express a gas vesicle in a target cell and of the ability of the corresponding combination gyp genes combination to result in production of functional GV proteins capable of assembling in a GV thus providing a corresponding detectable GV type can be performed through a testing method also directed to verify detectability of the GV by a detection method of choice. The testing method can be performed in the target cell where detection of the GV type is desired or in testing cells having a cell environment equivalent to the cell environment of the target cell in terms of expression of GV genes and GV formation and thus provide a model to verify ability of the gyp genes to provide a GVGC for the target cells. In the method to identify a desired GVGC the introducing can be performed using engineered polynucleotide constructs contacted with the target cell or testing cell for a time and under conditions to allow expression of the GVGC and formation of the GV type (e.g. using the methods described in U.S. application Ser. No. 15/663,635 published as US 2018/0030501 or the method described in U.S. application Ser. No. 16/736,683 filed on Jan. 7, 2020 and in PCT/US2020/012572 filed on Jan. 7, 2020 published as WO/2020/146379 each incorporated herein by reference in its entirety). The method further comprises detecting formation of a gas vesicle in the target cell or testing cell following the introducing with a pre-set method of detection. Preset methods of detection can be directed to detect acoustic and/or magnetic properties that are of interest in desired applications of the corresponding GV type. Preferably the testing can be performed in a target cell or testing cell, that have been modified, either chemically or genetically, to have the same cellular turgor pressure as the target cells according to methods identifiable by a skilled person.

[0084] Exemplary methods of detecting functional GVGC such as Transmission Electron Microscopy (TEM) and optical scattering, optical phase detection, xenon hyperCEST MRI can be used as will be understood by a skilled person.

[0085] A GV gene cluster encoding for GV proteins typically comprises Gas Vesicle Assembly (GVA) genes and Gas Vesicle Structural (GVS) genes.

[0086] The term Gas Vesicle Structural (GVS) proteins as used herein indicates proteins forming part of a gas-filled protein structure intracellularly expressed by certain bacteria or archaea and can be used as a mechanism to regulate cellular buoyancy in aqueous environments [7]. In particular, in naturally occurring GVs, a GVS shell comprises a GVS identified as gvpA or gvpB (herein also referred to as gvpA/B) and optionally also a GVS identified as gvpC.

[0087] In Gas Vesicle of the instant disclosure, Gas Vesicle Structural (GVS) proteins comprise GVS identified as gvpA/B and A protease sensitive gvpC which form the shell of a GV.

[0088] Reference is made to the illustration of FIG. 1 showing a schematic representation of the structure of an exemplary GV. In the illustration of FIG. 1 GvpA/B and GvpC are indicated as the two major structural constituents of the GV shell, with GvpA/B ribs (1) (gray) forming the primary GV shell and the outer scaffold protein GvpC (2) (black) conferring structural integrity. In particular, in the illustration of FIG. 1, the light gray elements represent the proteinaceous gas vesicle shell, comprising multiple copies of GvpA and other minor structural constituents. In the illustration of FIG. 1, the dark rectangles (2) bound to the surface of the gas vesicle shell represent GvpC, a protein that affects mechanical and acoustic properties of the gas vesicle.

[0089] In particular, gvpB gene is a gene encoding for gas vesicle structural protein B. gvpB genes is highly homologous to gvpA gene encoding for gas vesicle structural protein A. A gyp A/B is a protein of the GV shell that has a higher than 60% and possibly higher than 70% identity to the following consensus sequence: SSSLAEVLDRILDKGXVIDAWARVSLVGIEILTIEARVVIASVDTYLR (SEQ ID NO: 1) wherein X can be any amino acid. In particular in a gvpA/B of prokaryotes, the consensus sequence of SEQ ID NO: 1 typically forms a conserved secondary structure having an alpha-beta-beta-alpha structural motif formed by portions of the consensus sequence comprising the amino acids LDRILD (SEQ ID NO: 3) having an alpha helical structure, RILDKGXVIDAWARVS (SEQ ID NO: 4) wherein X can be any amino acid, having a beta strand, beta strand structure, and DTYLR (SEQ ID NO: 5) having an alpha helical structure, as will be understood by a skilled person.

[0090] As used herein, “homology”, “sequence identity” or “identity” in the context of two nucleic acid or polypeptide sequences makes reference to the nucleotide bases or residues in the two sequences that are the same when aligned for maximum correspondence over a specified comparison window. When percentage of sequence identity or similarity is used in reference to proteins, it is recognized that residue positions which are not identical often differ by conservative amino acid substitutions, where amino acid residues are substituted with a functionally equivalent residue of the amino acid residues with similar physiochemical properties and therefore do not change the functional properties of the molecule.

[0091] A functionally equivalent residue of an amino acid used herein typically refers to other amino acid residues having physiochemical and stereochemical characteristics substantially similar to the original amino acid. The physiochemical properties include water solubility (hydrophobicity or hydrophilicity), dielectric and electrochemical properties, physiological pH, partial charge of side chains (positive, negative or neutral) and other properties identifiable to a person skilled in the art. The stereochemical characteristics include spatial and conformational arrangement of the amino acids and their chirality. For example, glutamic acid is considered to be a functionally equivalent residue to aspartic acid in the sense of the current disclosure. Tyrosine and tryptophan are considered as functionally equivalent residues to phenylalanine. Arginine and lysine are considered as functionally equivalent residues to histidine.

[0092] A person skilled in the art would understand that similarity between sequences is typically measured by a process that comprises the steps of aligning the two polypeptide or polynucleotide sequences to form aligned sequences, then detecting the number of matched characters, i.e. characters similar or identical between the two aligned sequences, and calculating the total number of matched characters divided by the total number of aligned characters in each polypeptide or polynucleotide sequence, including gaps. The similarity result is expressed as a percentage of identity.

[0093] As used herein, “percentage of sequence identity” means the value determined by comparing two optimally aligned sequences over a comparison window, wherein the portion of the polynucleotide sequence in the comparison window may comprise additions or deletions (gaps) as compared to the reference sequence (which does not comprise additions or deletions) for optimal alignment of the two sequences. The percentage is calculated by determining the number of positions at which the identical nucleic acid base or amino acid residue occurs in both sequences to yield the number of matched positions, dividing the number of matched positions by the total number of positions in the window of comparison, and multiplying the result by 100 to yield the percentage of sequence identity.

[0094] As used herein, “reference sequence” is a defined sequence used as a basis for sequence comparison. A reference sequence may be a subset or the entirety of a specified sequence; for example, as a segment of a full-length protein or protein fragment. A reference sequence can comprise, for example, a sequence identifiable a database such as GenBank and UniProt and others identifiable to those skilled in the art.

[0095] As understood by those skilled in the art, determination of percent identity between any two sequences can be accomplished using a mathematical algorithm. Non-limiting examples of such mathematical algorithms are the algorithm of Myers and Miller [14], the local homology algorithm of Smith et al. [15]; the homology alignment algorithm of Needleman and Wunsch [16]; the search-for-similarity-method of Pearson and Lipman [17]; the algorithm of Karlin and Altschul [18], modified as in Karlin and Altschul [19]. Computer implementations of these mathematical algorithms can be utilized for comparison of sequences to determine sequence identity. Such implementations include, but are not limited to: CLUSTAL in the PC/Gene program (available from Intelligenetics, Mountain View, Calif.); the ALIGN program (Version 2.0) and GAP, BESTFIT, BLAST, FASTA [17], and TFASTA in the Wisconsin Genetics Software Package, Version 8 (available from Genetics Computer Group (GCG), 575 Science Drive, Madison, Wis., USA). Alignments using these programs can be performed using the default parameters.

[0096] Thus, a gvpA/B protein can be identified for example by isolating GVs from a prokaryote, isolating the protein from the protein shell of the GV and obtaining the amino acid sequence of the isolated protein. In addition or in the alternative to the isolating the GVs and isolating the protein, the method can include obtaining amino acidic sequences of the shell proteins of the GV of the prokaryote of interest from available database. The method further comprises performing a sequence alignment of the obtained amino acidic sequences against the gvpA/B protein consensus sequence of SEQ ID NO: 1.

[0097] In particular the isolating GVs from the prokaryote can be performed following methods to isolate gas vesicles as described in U.S. application Ser. No. 15/613,104, filed on Jun. 2, 2017. The isolating the protein for the protein shell of the GV and obtaining the related amino acidic sequence can be performed with tandem liquid chromatography mass-spectrometry alone or in combination with obtaining amino acid sequences of the isolated protein with wet lab techniques or from available databases comprising the sequences of the prokaryote of interest as well as additional techniques and approaches identifiable by a skilled person. Obtaining amino acid sequences of GV shell proteins of the prokaryote of interest can be performed by screening available databases of gene and protein sequences identifiable by a skilled person. Performing a sequence alignment of the sequences of the isolated GV proteins or proteins encoded in the genome of a prokaryote of interest can be performed (using Protein BLAST or other alignment algorithms known in the art) against the gvpA/B protein consensus sequence of SEQ ID NO: 1. In particular, a sequence alignment can be performed using gvpA/B protein sequences from the closest phylogenetic relative to the prokaryote of interest. Reference is made to Example 7 showing exemplary phylogenetic relationships between gvpA/B proteins of exemplary prokaryotic species.

[0098] In GVs of the disclosure, a gvpC gene encodes for a gvpC protein which is a hydrophilic protein of a GV shell, including multiple repeats regions within a central portions flanked by an N-terminal region and a C terminal region.

[0099] The term “repeat region” or “repeat” as used herein with reference to a protein refers to the minimum sequence (herein also repeat sequence) that is present within the protein in multiple repetitions along the protein sequence without any gaps. Accordingly, in a gvpC multiple repetitions of a same repeat form a central portion flanked by an N-terminal region and a C-terminal region. In a same gvpC, repetitions of a same repeat in the gvpC protein can have different lengths and different sequence identity one with respect to another.

[0100] Repeat regions within any given gvpC sequence ‘X’ from organism ‘Y’ can be identified by comparing the related sequence with the sequence of a known gvpC (herein e.g. reference gvpC sequence “Z”). In particular, the comparing can be performed by aligning sequence ‘X’ to the reference gvpC sequence ‘Z’ using a sequence alignment tools such as BLASTP or other sequence alignment tools identifiable by a skilled person at the date of filing of the application upon reading of the present disclosure. In particular, a reference sequence ‘Z’ is chosen from a host that is the closest phylogenetic relative of ‘Y’, from a list of Anabaena flos-aquae, Halobacterium salinarum, Haloferax mediditerranei, Microchaetae diplosiphon and Nostoc sp. The sequence alignment of ‘X’ and ‘Z’ (e.g. a BLASTP) is performed by performing a first alignment of sequence X and sequence Z to identify a beginning and an end of a repeat in ‘X as well as a number of repetitions of the identified repeat, in accordance with the known repeats in 7’. The first alignment results in at least one first aligned portion of X with respect to reference sequence Z. The aligning can also comprises performing a second alignment between the at least one first aligned portion of X identified following the first alignment and additional portions of X to identify at least one repeat ‘R1’ in X. Other repeats in ‘X’ (i.e. R2, R3, R4 . . . ) can subsequently be identified with respect to R1. In performing alignment steps sequence are identified as repeat when the sequence shows at least 3 or more of the characteristics described in U.S. application Ser. No. 15/663,635 published as US 2018/0030501 (incorporated herein by reference in its entirety) which also include additional features of gvpC proteins and the related identification.

[0101] In performing alignment steps, sequences are identified as repeat when the sequence shows at least 3 or more of the following characteristics:

1) There are no gaps or spacer amino acids between any two adjacent repetition of a repeat (see e.g. the repeat sequences of exemplary GvpC of FIG. 2 and FIG. 3).
2) Each repetition of a repeat has a sequence length between 18-45 amino acids, e.g. 33 amino acids seen for 100% of the repeats in Anabaena flos-aquae, Microchaetae diplosiphon and Nostoc sp. (see e.g. the repeat sequences of exemplary GvpC of FIG. 3).
3) Upon alignment of all the repeats within a given GvpC sequence, there exists for every position in more than 50% of the total number of repeats, greater than 50% sequence similarity of the amino acid residues in each repeat (see e.g. the repeat sequences of exemplary GvpC of FIG. 3).
4) Sub-sequences of at least 3 or more amino acids at the beginning or end of the repeat that are conserved across 50% or more of the repeats in a given GvpC sequence, also referred to as “consensus sequences”. Exemplary embodiments of such consensus sequences are QAQELLAF (SEQ ID NO: 6) at the end of repeats in Anabaena flos-aquae, LHQF (SEQ ID NO: 11) at the end of repeats in Microchaete diplosiphon, LSQF (SEQ ID NO: 12) at the end of repeats in Microcystis aeruginosa and DAF (SEQ ID NO: 13) at the beginning of repeats in Halobacterium salinarum. (e.g. see e.g. the repeat sequences of exemplary GvpC of FIGS. 2 and 3).
5) The consensus sequence of all the repeats within a given GvpC sequence show greater than 60% identity to the consensus sequence of all the repeats within another GvpC from a different microbial host of the same phylogenetic order (see e.g. the repeat sequences of exemplary GvpC of FIG. 3, panels g-h).

[0102] Accordingly, in a GvpC herein described the central portion comprises repeats characterized by comprising at least three of the above characteristics as will be understood by a skilled person.

[0103] In some exemplary embodiments, the repeat has at least 90% sequence identity with another repeat within the same GvpC sequence.

[0104] In GvpC of GV herein described, the central portion comprising the multiple repeats is flanked by an N-terminal region and a C-terminal region. In a GvpC the N-terminal region comprises the amino acid residues upstream (towards the N-terminus) of the first repeated sequence of the GvpC's repeat and including the N-terminus, while the C-terminal region comprises the amino acid residues downstream (towards the C-terminus) of the last repeated sequence of the GvpC's repeat and comprises the C-terminus. Therefore, the N-terminal region is the region adjacent to the N-terminal portion of the first repeat of the GvpC and the C-terminal region is adjacent to the C-terminal portion of the last repeat and comprises the C-terminus of the protein)

[0105] The term the “amino terminus” or “N-terminus” indicate the amino acid residue of a linear polypeptide chain at one of the extremities of the linear polypeptide chain which, when not involved in a peptide bond, presents an amino group. The term the “carboxyl terminus” “C-terminus” indicate the amino acid residue of a linear polypeptide chain at one of the extremities of the linear polypeptide chain which, when not involved in a peptide bond, presents a carboxyl group. An N terminus or a C-terminus of a polypeptide is typically comprised within a “tail” of the protein which indicates a segment or fragment at the related end of the protein. In a GvpC “tail” of the N-terminus is provided by the N-terminal region and the “tail” of the C-terminus is provided by the C-terminal region of the GvpC>

[0106] In some embodiments, the central portion of the GvpC comprises repeat regions adjacent one with another and/or with the N-terminal region and C-terminal region. In some embodiments, the central portion of the GvpC comprises repeat regions separated by gaps. The region between repeats are herein also indicated as “junction region” or “junction” and can be formed by a bond (in case of repeat regions adjacent one with another) or a by a series of residues e interspersed between repeats as will be understood by a skilled person, depending on the specific type and configuration of the GvpC.

[0107] Reference is made in this connection to the exemplary schematic illustration of FIG. 4 panel A wherein a schematic illustration of an exemplary configuration of a gvpC is show in which repeat regions of different lengths indicated as (1) (2) (3) (N) and (N−1) form a central portions flanked by the N terminal and C terminal sequence. In the exemplary schematic illustration of FIG. 4 panel A, an N number of repeat regions schematically illustrated by labeling repeat regions (1) (2) (3) and (N−1) and are shown. In GvpC according to the present disclosures N can typically range from 1 to 7 as will be understood by a skilled person. In the exemplary schematic illustration of FIG. 4 panel A repeat regions are adjacent one with the other with no gaps between the repeats, while repeat regions are separated by junctions of different length interspersed between repeats as will be understood by a skilled person.

[0108] Exemplary GvpC sequences and related N-terminal region, C-terminal region and repeats are reported in Tables 1 to 5 below

TABLE 1
GvpC in Anabaena flos-aquae

| Position | Sequence | SEQ ID NO |
|---|---|---|
| N-terminus | MISLMAKIRQEHQSIAEK | 14 |
| Repeat 1 | VAELSLETREFLSVTTAKRQEQAEKQAQELQAF | 15 |
| Repeat 2 | YKDLQETSQQFLSETAQARIAQAEKQAQELLAF | 16 |
| Repeat 3 | HKELQETSQQFLSATAQARIAQAEKQAQELLAF | 17 |
| Repeat 4 | YQEVRETSQQFLSATAQARIAQAEKQAQELLAF | 18 |
| Repeat 5 | HKELQETSQQFLSATADARTAQAKEQKESLLKF | 19 |
| C-terminus | RQDLFVSIFG | 20 |

TABLE 2
GvpC in Halobacterium Salinarum

| Position | Sequence | SEQ ID NO |
|---|---|---|
| N-terminus | MSVTDKRDEMSTARDKFAESQ | 21 |
| Repeat 1 | QEFESYADEFAADITAKQDDVSDLVDAITDFQAEMTNTT | 22 |
| Repeat 2 | DAFHTYGDEFAAEVDHLRADIDAQRDVIREMQ | 23 |
| Repeat 3 | DAFEAYADIFATDIADKQDIGNLLAAIEALRTEMNSTH | 24 |
| Repeat 4 | GAFEAYADDFAADVAALRDISDLVAAIDDFQEEFIAVQ | 25 |
| Repeat 5 | DAFDNYAGDFDAEIDQLHAAIADQHDSFDATA | 26 |
| Repeat 6 | DAFAEYRDEFYRIEVEALLEAINDFQQDIGDFRAEFETTE | 27 |
| Repeat 7 | DAFVAFARDFYGHEITAEEGAAEAEAEPVEADADVEAEAEVSPD | 28 |
| C-terminus | EAGGESAGTEEEETEPAEVETAAPEVEGSPADTADEAEDTEAEEE | 29 |
| | TEEAPEDMVQCRVCGEYYQAITEPHLQTHDMTIQEYRDEYGEDV | |
| | PLRPDDKT | |

TABLE 3
GvpC in Haloferax Mediterranei

| Position | Sequence | SEQ ID NO |
|---|---|---|
| N-terminus | MSVKDKREKMTATREEFAEVQ | 30 |
| Repeat 1 | QAFAAYADEFAADVDDKRDVSELVDGIDTLRTEMNSTN | 31 |
| Repeat 2 | DAFRAYSEEFAADVEHFHTSVADRR | 32 |
| Repeat 3 | DAFDAYADIFATDVAEMQDVSDLLAAIDDLRAEMDETH | 33 |
| Repeat 4 | EAFDAYADAFVTDVATLRDVSDLLTAISELQSEFVSVQ | 34 |
| Repeat 5 | GEFNGYASEFGADIDQFHAVVAEKRDGHKDVA | 35 |
| Repeat 6 | DAFLQYREEFHGVEVQSLLDNIAAFQREMGDYRKAFETTE | 36 |
| Repeat 7 | EAFASFARDFYGQGAAPMATPLNNAAETAVTGTETEVDIPPI | 37 |
| C-terminus | EDSVEPDGEDEDSKADDVEAEAEVETVEMEFGAEMDTEADED | 38 |
| | VQSESVREDDQFLDDETPEDMVQCLVCGEYYQAITEPHLQTHD | |
| | MTIKKYREEYGEDVPLRPDDKA | |

TABLE 4
GvpC in Microchaete diplosiphon

| Position | Sequence | SEQ ID NO |
|---|---|---|
| N-terminus | MTPLMIRIRQEHRGIAEE | 39 |
| Repeat 1 | VTQLFKDTQEFLSVTTAQRQAQAKEQAENLHQF | 40 |
| Repeat 2 | HKDLEKDTEEFLTDTAKERMAKAKQQAEDLFQF | 41 |
| Repeat 3 | HKEMAENTQEFLSETAKERMAQAQEQARQLREF | 42 |
| Repeat 4 | HQNLEQTTNEFLADTAKERMAQAQEQKQQLHQF | 43 |
| C-terminus | RQDLFASIFGTF | 44 |

TABLE 5
GvpC in Nostoc sp.

| Position | Sequence | SEQ ID NO |
|---|---|---|
| N-terminus | MTALMVRIRQEHRSIAEE | 45 |
| Repeat 1 | VTQLFRETHEFLSATTAHRQEQAKQQAQQLHQF | 46 |
| Repeat 2 | HQNLEQTTHEFLTETTTQRVAQAEAQANFLHKF | 47 |
| Repeat 3 | HQNLEQTTQEFLAETAKNRTEQAKAQSQYLQQF | 48 |
| C-terminus | RKDLFASIFGTF | 49 |

[0109] A GvpC protein in the sense of the disclosure is typically rich in glutamine, alanine and glutamic acid residues, which account for >40% of the residues. In the exemplary Anabaena flos-aqaue, GvpC comprises five highly conserved 33-amino acid repeats with predicted alpha-helical structure, and is believed to bind across GvpA ribs to provide structural reinforcement [3], which aligns with experimental data. In biochemical studies, removal of GvpC and truncations to its sequence were shown to result in a reduced threshold for Ana GV collapse under hydrostatic pressure. In addition, previous studies in other species have demonstrated that GvpC can tolerate fusions of bacterial and viral polypeptides.

[0110] GvpC sequences in different bacteria or archaea producing GVs typically have a greater than 15% sequence identity and are produced by genes found in the gas vesicle gene cluster.

[0111] In a GVGC, the GVS genes are comprised with Gas Vesicle Assembly genes. The Gas Vesicle Assembly genes are genes encoding for GVA proteins. GVA proteins comprise proteins with various putative functions such as nucleators and/or chaperons as well as proteins with an unknown specific function related to the assembly of the GV.

[0112] In a prokaryotic cell GVA genes are all the genes within one or more operons comprising at least one of a gvpN and a gvpF excluding any gvpA/B and gvpC gene possibly present within said one or more operons. Therefore GVA genes can be identified by identifying an operon in a prokaryote including at least one of a gvpN and a gvpF excluding any gvpA/B and gvpC gene.

[0113] Preferably the one or more operons comprising all the GVA genes of a prokaryote can be identified and detected by detecting a gvpN gene encoding for a GV protein consensus sequence RALXYLQAGYXVHXRGPAGTGKTTLAMHLAXXLXRPVMLIXGDDEFXTSDLIGSE SGYXXKKVVDNYIHSVVKVEDELRQNWVDNRLTXACREGFTLVYDEFNRSRPEXN NVLLSVLEEKILXLP (SEQ ID NO: 50) wherein X indicates any amino acid or a sequence of any length having at least 50%, and more preferably 60% or higher, most preferably from 50% to 83% identity.

[0114] gvpN genes of various microorganisms have a sequence encoding for a gvpN protein within the consensus SEQ ID NO: 50. In particular, gvpN gene in the sense of the disclosure can be a gene encoding for sequence MTVLTDKRKKGSGAFIQDDETKEVLSRALSYLKSGYSIHFTGPAGGGKTSLARALA KKRKRPVMLMHGNHELNNKDLIGDFTGYTSKKVIDQYVRSVYKKDEQVSENWQD GRLLEAVKNGYTLIYDEFTRSKPATNNIFLSILEEGVLPLYGVKMTDPFVRVHPDFR VIFTSNPAEYAGVYDTQDALLDRLITMFIDYKDIDRETAILTEKTDVEEDEARTIVTL VANVRNRSGDENSSGLSLRASLMIATLATQQDIPIDGSDEDFQTLCIDILHHPLTKCL DEENAKSKAEKIILEECKNIDTEEK (SEQ ID NO: 51) or a sequence of any length having at least 30% sequence identity with respect to SEQ ID NO: 51, preferably at least 50%, and more preferably 60% or higher.

[0115] gvpF gene in the sense of the disclosure can be a gene encoding for sequence MSETNETGIYIFSAIQTDKDEEFGAVEVEGTKAETFLIRYKDAAMVAAEVPMKIYHP NRQNLLMHQNAVAAIMDKNDTVIPISFGNVFKSKEDVKVLLENLYPQFEKLFPAIK GKIEVGLKVIGKKEWLEKKVNENPELEKVSASVKGKSEAAGYYERIQLGGMAQKM FTSLQKEVKTDVFSPLEEAAEAAKANEPTGETMLLNASFLINREDEAKFDEKVNEA HENWKDKADFHYSGPWPAYNFVNIRLKVEEK (SEQ ID NO: 52) or a sequence of any length having at least 20% sequence identity with respect to SEQ ID NO: 52, preferably at least 50%, more preferably 60%, and at least 70% or higher.

[0116] The term “operon” as described herein indicates a group of genes arranged in tandem in a prokaryotic genome as will be understood by a skilled person. Operons typically encode proteins participating in a common pathway are organized together as understood by those skilled in the art. Typically, genes of an operon are transcribed together into a single mRNA molecule referred to as polycistronic mRNA. Polycistronic mRNA comprises several open reading frames (ORFs), each of which is translated into a polypeptide. These polypeptides usually have a related function and their coding sequence is grouped and regulated together in a regulatory region, containing a promoter and an operator. Typically, repressor proteins bound to the operator sequence can physically obstruct the RNA polymerase enzyme from binding the promoter, preventing transcription. An example of a prokaryotic operon is the lac operon, which natively regulates transport and metabolism of lactose in E. coli and many other enteric bacteria.

[0117] In an operon, each ORF typically has its own ribosome binding site (RBS) so that ribosomes simultaneously translate ORFs on the same mRNA. Some operons also exhibit translational coupling, where the translation rates of multiple ORFs within an operon are linked. This can occur when the ribosome remains attached at the end of an ORF and translocates along to the next ORF without the need for a new RBS. Translational coupling is also observed when translation of an ORF affects the accessibility of the next RBS through changes in RNA secondary structure.

[0118] In some embodiments, a GV cluster comprises one of gvpN or gvpF. In several embodiments GV clusters include both gvpN and gvpF as will be understood by a skilled person. In this connection, reference is made to Example 12 and FIGS. 20 and 21 of related application U.S. application Ser. No. 15/663,635 published as US 2018/0030501 incorporated herein by reference in its entirety, showing exemplary gas vesicle gene clusters operons [1, 2] comprising GVS and GVA genes and related exemplary configuration. In particular, as shown in Example 12 of related application U.S. Application Ser. No. 15/663,635 published as US 2018/0030501, typically a native GV gene cluster has GVA genes comprising both gvpN and gvpF genes, even if native GV gene clusters are known having a gvpN gene or a gvpF gene, as understood by skilled persons.

[0119] Accordingly, for a certain prokaryote, GVA genes in the sense of the disclosure indicate all the genes that are comprised in the one or more operons having at least one of a gvpN and/or a gvpF herein described and excluding any Gas Vesicle Structural (GVS) genes of the prokaryotes possibly comprised within the one or more operons.

[0120] Thus, GVA genes comprised in a gas vesicle gene cluster in a prokaryote can be identified for example by obtaining genome sequence of the prokaryote of interest and performing a sequence alignment of the protein sequences encoded in the genome of the prokaryote of interest against a gvpN protein sequence and/or a gvpF protein sequence.

[0121] In particular, obtaining the genome sequence of the prokaryote of interest, can be performed either using wet lab techniques identifiable by a skilled person upon reading of the present disclosure, or obtained from databases of gene and protein sequences also identifiable by a skilled person upon reading of the present disclosure. Performing a sequence alignment of the protein sequences encoded in the genome of the prokaryote of interest can per performed using Protein BLAST or other alignment algorithms identifiable by a skilled person. Exemplary gvpN protein sequence and/or a gvpF protein sequence that can be used in performing the alignment are sequences SEQ ID NO: 51 and/or SEQ ID NO: 52. In particular, a sequence alignment can be performed using gvpN and/or gvpF protein sequences from the closest phylogenetic relative to the prokaryote of interest. Reference is made to Example 7 showing exemplary phylogenetic relationships between gvpF and gvpN proteins of exemplary prokaryotic species. Accordingly, one or more operons that comprise the gvpN and/or gvpF genes can be identified, and any other gyps within the one or more operons can also be identified, wherein the other gyps are comprised in ORFs within the one or more operons, excluding any ORFs encoding gvpA/B or gvpC genes comprised in the one or more operons of the GV gene cluster.

[0122] Accordingly, GVA genes can also be identified based on the configuration of operon and Gene Clusters identified through homology (see e.g. Example 6), phylogenesis (see e.g. Example 7) also using the gvpA/B, gvpN and/or gvpF consensus of SEQ ID Nos: 1, 50-52 herein provided, preferably gvpA/B consensus of SEQ ID NO: 1 and gvpN consensus of SEQ ID NOs: 50-51. Reference is also made in this connection to the indication of Example 8 reporting exemplary GVGC configurations of naturally occurring Gas Vesicle gene clusters identified with method herein described and additional methods identifiable by a skilled person.

[0123] GVS genes of a GVGC of the disclosure, identified with methods herein indicated, typically comprise gvpA or gvpB which have similar sequences and are equivalent in their purpose and optionally gvpC. Exemplary sequences for gvpA and gvpB genes of GV gene clusters in the sense of the disclosure, which can also be used to identify additional GVS and GVGC through homology and alignment in addition to the use of the consensus sequence SEQ ID NO: 1, are reported in Example 9.

[0124] GVGC of the disclosure can comprise hybrid Gas Vesicles Gene Clusters. The term “hybrid gene cluster” or “hybrid cluster” as used herein indicates a cluster comprising at least two genes native to different species and resulting in a cluster not natively in any organisms. Typically, a hybrid gene cluster comprises a subset of gas vesicle genes native to a first bacterial species and another subsets of gas vesicle genes native to one or more bacterial species, with at least one of the one or more bacterial species different from the first bacterial specie Accordingly, a hybrid GV gene clusters includes a combination of GV genes which is not native in any naturally occurring prokaryotes.

[0125] GVA genes of a GVGC of the disclosure, identified with methods herein indicated, typically comprise proteins identified as gvpF, gvpG, gvpL, gvpS, gvpK, gvpJ, and gvpU. GVA genes and proteins can also comprise gvpR and gvpT (see e.g. B. megateriurn GVA) gvpV, gvpW (se Anaboena flos ague and Serratia GVA) and/or gyp X, gyp Y and gyp Z (see e.g. Serratiai GVA. Preferably GVGC of the disclosure further comprise gvpN which result in a more robust detection with many detection methods herein described. Exemplary sequences for GVA genes of GV gene clusters in the sense of the disclosure which can also be used to identify additional GVAs and GVGC through homology and alignment are reported in Example 9.

[0126] In GVGC herein described co-expression of the GVS genes including the protease sensitive GVPC and the GVA genes in connection with regulatory sequence capable of operating in a host cell are configured to provide a GV type, with a different GVGC typically resulting in a different GV type.

[0127] The wording “GV type” in the sense of the disclosure indicates a gas vesicle having dimensions and shape resulting in distinctive mechanical, acoustic, surface and/or magnetic properties as will be understood by a skilled person upon reading of the present disclosure. In particular, a skilled person will understand that different shapes and dimensions will result in different properties in view of the indications in provided in U.S. Ser. No. 15/613,104 published as US2018/0028693 and U.S. Ser. No. 15/663,600 published as US2018/0038922 and additional indications identifiable by a skilled person Typically, larger volume results in stronger per-particle scattering, smaller diameter generally results in higher collapse pressure after removal of gvpC, and different dimensions result in different ratios of T2/T2* relaxivity per volume-averaged magnetic susceptibility ([20]).

[0128] In particular, each GV type typically has mechanical and acoustic properties which result in an associated collapse pressure profile and ultrasound response as will be understood by a skilled person.

[0129] The wording “collapse pressure profile” or “pressure profile” in connection with GV of the disclosure indicate a curve of pressure vs % of GV collapse detectable by applying a ramping value of pressures to a GV type and measuring the % collapse at each pressure. The point (pressure) of the curve (profile) where 50% or more collapsed GV are detected provides the “collapse pressure” or “collapse threshold” of the GV type. An imaging pressure amplitude can be selected for each GV type based on the collapse pressure as will be understood by a skilled person. Accordingly, for a GV type, a collapsing ultrasound is typically provided at a high ultrasound pressure amplitude in order to collapse the GV, while the imaging ultrasound is typically provided at a low ultrasound pressure amplitude to avoid collapsing of the GVs. The imaging ultrasound is typically a low-pressure ultrasound, applied at an imaging ultrasound pressure lower than a selectable acoustic collapse pressure value as will be understood by a skilled person.

[0130] The term “ultrasound response” as used herein indicates ultrasound waves provided as an ultrasound reflection (echo) of ultrasound-range acoustic energy applied to a reference area. Accordingly, the ultrasound response of the area is based on the mechanical and acoustic properties of items in the referenced area, which herein include GVs (e.g. acting as a contrast agent). An ultrasound response can take the form of a linear or non linear. The term “nonlinear signal” refers to a signal that does not obey superposition and scaling properties, with regards to the input. The term “linear signal” refers to a signal that does obey those properties. One example of nonlinearity is the production of 2^{nd}+ order harmonic signals in response to ultrasound excitation at a certain fundamental frequency. Another example is a nonlinear response to acoustic pressure. An example of a nonlinear signal is the increase in both fundamental and harmonic signals with increasing pressure of the transmitted imaging pulse, wherein certain GVs exhibit a highly nonlinear relationship between these signals and the pulse pressure. [21]

[0131] In particular, as part of the ultrasound response, some GV types are configured to buckle at an ultrasound pressure indicated as buckling pressure. The buckling pressure is an ultrasound pressure above which the GVs would provide a distinctively increased nonlinear ultrasound signal due to certain morphology and shell mechanical properties, in this case for GVs with shortened or removed GvpCs due to being cleaved/degraded by protease. Those GVs buckle more easily under acoustic pressure. As already observed in Maresca et al 2017 [22] and in Maresca et al 2018 [23]. (see also US Pat. Pub. 2019/0314000], incorporated herein by reference in their entirety, presence of buckling produces a significant nonlinear contrast in response to applied ultrasound pressure which can be distinguished from nearly linear or less nonlinear signals produced by non-buckling GVs and background tissue in response to applied ultrasound pressure. Given that such nonlinear ultrasound contrast senses buckling and buckling becomes activated in the GVs engineered to have protease-cleavable GvpCs, according to the present disclosure, by protease activity, the present disclosure allows to sense presence of such activity.

[0132] Accordingly, in embodiments herein described, GVGC can be selected based on desired properties of the corresponding GV type and in particular based on the collapse pressure and pressure profile. In particular, to this extent, a skilled person can use naturally occurring GVGC, can provide engineered GVGC wherein some of the naturally occurring gyp genes are omitted, and/or can provide hybrid GVGC in which GVAs and GVS genes of naturally occurring GVGCs are combined to provide GV types having the shape and dimensions resulting in the desired properties.

[0133] Gas vesicles of the present disclosure and related GvpC, GVGC as well as polynucleotides, gene cassettes, vectors, compositions methods and systems, herein described are provided based on the surprising finding that a gas vesicle can be engineered to modify the related collapse pressure, pressure profile, and nonlinear ultrasound contrast signal in response to a protease.

[0134] The term “protease”, also called a peptidase or proteinase or proteolytic enzyme, indicates any enzyme capable of performing proteolysis by hydrolysis of the peptide bonds that link amino acids together in a polypeptide chain. A protease catalyzes breaking of peptide bonds linking amino acid residues of a polypeptide chain thus converting it into shorter fragments. In proteases in the sense of the disclosure comprise proteases capable of detaching the terminal amino acids from the protein chain (exopeptidases, such as aminopeptidases, carboxypeptidase A); and proteases that capable of breaking internal peptide bonds of a protein (endopeptidases, such as trypsin, chymotrypsin, pepsin, papain, and elastase).

[0135] Proteases in the sense of the disclosure, specifically proteolyze protein substrates at corresponding sequences of amino acid residues, herein also identified as “protease recognition site”.

[0136] The wording “specific” “specifically” or “specificity” as used herein with reference to the binding of a first molecule to second molecule refers to the recognition, contact and formation of a stable complex between the first molecule and the second molecule, together with substantially less to no recognition, contact and formation of a stable complex between each of the first molecule and the second molecule with other molecules that may be present. Exemplary specific bindings are antibody-antigen interaction, cellular receptor-ligand interactions, polynucleotide hybridization, enzyme substrate interactions and additional interaction identifiable by a skilled person. In some instances specific binding can be performed by a molecule following activation (e.g. through binding to ions or other cofactors) as will be understood by a skilled person.

[0137] In particular, the term “specific” as used herein with reference to binding between protease and a corresponding recognition sites refers to the stable binding of the protease with the region forming one or more recognition site with substantially less to no recognition, contact and formation of a stable complex with other regions of the protein comprising the one or more recognition sites. The term “specific” as used herein with reference to a molecular component of a complex, refers to the unique association of that component to the specific complex which the component is part of. The term “specific” as used herein with reference to a sequence of a polynucleotide refers to the unique association of the sequence with a single polynucleotide which is the complementary sequence. By “stable complex” is meant a complex that is detectable and does not require any arbitrary level of stability, although greater stability is generally preferred.

[0138] Typically, proteases in the sense of the disclosure are capable to specifically cleave corresponding recognition sites within a protein. However proteases can also specifically recognize more than one corresponding recognition site which can be presented in in more than one protein substrate. in some cases, wherein the more than one recognition site comprises a plurality of recognition sites, the related sequences have a consensus recognition sequence. Accordingly, proteases in the sense of the disclosure comprise promiscuous proteases capable of reacting with wide range of protein substrates including one or more recognition sequences. This is the case for example of digestive enzymes such as trypsin which have to be able to cleave the array of proteins ingested into smaller peptide fragments. Promiscuous proteases typically bind to a single amino acid on the substrate and so only have specificity for that residue. For example, trypsin is specific for the sequences . . . K\ . . . or R\ . . . (‘\’=cleavage site). Proteases in the sense of the disclosure comprise specific proteases capable to only cleave substrates with a certain sequence or amino acid structure. Proteases, being themselves proteins, can be cleaved by other protease molecules, sometimes of the same variety. This acts as a method of regulation of protease activity. Some proteases are less active after autolysis (e.g. TEV protease) whilst others are more active (e.g. trypsinogen).

[0139] Proteases in the sense of the disclosure can also be categorized based on the location of the corresponding recognition sites, as endoprotease, exoproteases and processive proteases.

[0140] The term “endoproteases” as used herein indicates a type of proteases capable of breaking internal peptide bonds in a polypeptide portion remote from the C- or N-terminus. Endoproteases can be classified into seven broad groups based on the amino acid at the (protease's) active site used to perform a nucleophilic attack on the substrate: Serine proteases —using a serine alcohol; Cysteine proteases—using a cysteine thiol; Threonine proteases—using a threonine secondary alcohol; Aspartic proteases—using an aspartate carboxylic acid; Glutamic proteases—using a glutamate carboxylic acid; Metalloproteases—using a metal, usually zinc; Asparagine peptide lyases—using an asparagine to perform an elimination reaction (not requiring water), as would be understood by a skilled person. In particular, Aspartic, glutamic and metallo-proteases activate a water molecule which performs a nucleophilic attack on the peptide bond to hydrolyze it. Serine, threonine and cysteine proteases use a nucleophilic residue in attack (usually in a catalytic triad). That residue performs a nucleophilic attack to covalently link the protease to the substrate protein, releasing the first half of the product. This covalent acyl-enzyme intermediate is then hydrolyzed by activated water to complete catalysis by releasing the second half of the product and regenerating the free enzyme.

[0141] An endoprotease “cleavage site” as used herein indicates an amino acid sequence configured to be cleaved by the endoprotease/endopeptidase in the sense of the disclosure. Cleavage sites are specific peptide sequences, or more often, peptide motifs at which site-specific proteases will cleave or cut the protein.

[0142] An endoproteinase in the sense of the disclosure is typically a specific endoprotease that only cleave substrates with a certain sequence or amino acid structure. For example, Trypsin cleave peptide bonds after Arg or Lys, unless followed by Pro; Chymotrypsin cleave peptide bonds after Phe, Trp, or Tyr, unless followed by Pro; Elastase cleave peptide bonds after Ala, Gly, Ser, or Val, unless followed by Pro; Thermolysin cleave peptide bonds before Ile, Met, Phe, Trp, Tyr, or Val, unless preceded by Pro; Pepsin cleave peptide bonds before Leu, Phe, Trp or Tyr, unless preceded by Pro; Glutamyl endopeptidase cleave peptide bonds after Glu.

[0143] The term “exopeptidases” as used herein act at or near the ends of the peptide chains, delineated as aminopeptidases and carboxypeptidases to indicate their action is at the N- or C-terminals of the peptide substrates. These enzymes can be further differentiated depending on the size of the moiety that is cleaved off, such as an amino acid, a dipeptide, or a tripeptide.

[0144] Microorganisms known to produce aminopeptidases include Aspergillus oryzae, Bacillus licheniformis, B. otulinum stearothermophilus, and Escherichia coli.

[0145] Microorganisms known to produce carboxypeptidases include Aspergillus, Penicillium, and Saccharomyces species. Carboxypeptidases can be differentiated further into three groups based on the presence of certain amino acid substituents at their active sites, namely the serine carboxyproteases, the metallocarboxyproteases, and the cysteine carboxyproteases.

[0146] Exoproteases recognizes protein substrates containing specific terminal peptide sequences called degrons. Degrons can be N-degrons or C-degrons which are degradation tags at the N-terminal and C-terminal residues of target protein substrates, respectively. For example, exoproteases of the carboxypeptidase G class are defined by their specificity of release of C-terminal glutamate residues from a wide range of N-acylating moieties, including peptidyl, aminoacyl, benzoyl, benzyloxycarbonyl, folyl and pteroyl groups. Carboxypeptidase is an exopeptidase that cleaves C-terminal aromatic and aliphatic amino acid residues from proteins/peptides.

[0147] Some exoproteases target unacetylated N-terminal Arg, -Lys, -His, -Leu, -Phe, -Tyr, -Trp, -Ile, and -Met. These exoproteases include the Saccharomyces cerevisiae Ubr1 E3; the mammalian Ubr1, Ubr2, Ubr4, and Ubr5 E3s; the Prt1 and Prt6 E3s of plants; and the mammalian non-E3 autophagy regulator p62/Sqstm1.

[0148] Exemplary exoproteases and their targeted C-degrons further include, ubiquitin ligases which recognize -GG, -RG, -PG, -XR, -RXXG, -EE, -RXX, -VX, -AX and -Z, Lon protease from the Gram-positive M. forum (rnf-Lon) which recognize the M. forum ssrA tag (mf-ssrA) and synthetic degrons [24].

[0149] Exemplary exoproteases and their targeted N-degrons include mammalian Ub-proteasome system that recognize certain N-terminal amino acid such as Arg, Trp, His, and a series of synthetic degrons [25].

[0150] The term “processive protease” refers to a protease that catalyze multiple rounds of proteolysis consecutively by hydrolysis of the peptide bonds that link amino acids together in a polypeptide chain while the polypeptide chain stays bound with the protease. The processive protease can be endoprotease and/or exoproteases. Exemplary processive proteases include bacterial Clp proteases and the mammalian proteasome.

[0151] Exemplary processive proteases and their recognition sites include proteasome-like ClpAP protease which recognizes bulky hydrophobic amino acids, such Phe, Leu, Trp and Tyr [26, 27], and proteasome-like bacterial protease ClpXP which recognizes -ANDENYALAA ttps://pubmed.ncbi.nlm.nih.gov/1962196/], on terminal as well as internal peptide bonds as will be understood by a skilled person.

[0152] Gas vesicles of the present disclosure and related GvpC, GVGC as well as polynucleotides, gene cassettes, vectors, compositions methods and systems, herein described are provided based on the surprising finding that GvpC engineered to include a protease recognition site can be configured to bind a GvpA/B of a GV type thus forming the protein shell of the GV type and at the same time present the protease recognition site for binding with a protease following assembly with the GvpA/B in a protease sensitive configuration. Such protease sensitive configuration of the engineered GvpC and GV results in a decrease of the collapse pressure, a shift of the corresponding pressure profile to lower pressure values and/or a change in the ultrasound contrast signal of the GV from a low or baseline nonlinear contrast signal to a higher/enhanced nonlinear contrast signal following cleavage by the protease of the protease recognition site presented on the protease sensitive GV type.

[0153] In protease sensitive GvpC herein described the GvpC is engineered to comprise at least one endoprotease cleavage site, an exoprotease specific degradation tag and/or processive protease recognition site.

[0154] In protease sensitive GvpC the protein recognition site can be attached to the GvpC sequence in various attachment sites within the GvpC.

[0155] The term “attach” or “attached” as used herein, refers to connecting or uniting by a bond, link, force, or tie in order to keep two or more components together, which encompasses either direct or indirect attachment. For example, “direct attachment” refers to a first molecule directly bound to a second molecule or material, while “indirect attachment” in refers to one or more intermediate molecules being disposed between the first molecule and the second molecule or material. Attachment between two referenced molecules therefore comprises connecting or uniting the two referenced molecules by covalent bonds, or non-covalent bonds between the two molecules introduced and by chemical modification of the molecules (such as with a maleimide-cysteine conjugation) or by creation of a precursor of the two molecules which will provide the two molecules attached one to the other (e.g. by creating a fusion gene comprising polynucleotides encoding for two polypeptide to be attached).

[0156] Attachments of polypeptides can be performed at their corresponding N-terminus and/or C-terminus or by insertion of a polypeptide within a reference polypeptide.

[0157] As used herein, in relation to proteins, the term “insertion” of a first protein (e.g. a peptide) in a second protein refers to the introduction of the first protein in between two adjacent amino acids of the second protein. As a result, an inserted first protein is located in between a first segment of the second protein having one of the adjacent amino acids attached to its C-terminus and a second segment of the second protein having the other one of the adjacent amino acids attached to its N-terminus.

[0158] In particular, an insertion of a first protein in a second protein is performed by forming a first covalent bond between the N-terminal amino acid of the first protein (which is typically a peptide) with a first amino acid of the two adjacent amino acids the second protein, and a second covalent bond between the C-terminal amino acid of the first protein with a second amino acid of the two adjacent amino acids of the second protein. As would be understood by a skilled person, a covalent bond between two amino acids in a protein is typically a peptide bond, which is a covalent bond between a carboxyl group and an amino group of two molecules or portions thereof, which results in releasing a molecule of water.

[0159] Accordingly, an insertion of a second protein in a first protein when performed at a protein level typically results in breaking the peptide bond between the two adjacent amino acids of the first protein and forming two new peptide bonds: one between one of the two adjacent amino acids of the first protein and the N-terminal amino acid of the second protein and the other peptide bond formed between the other one of the two adjacent amino acid of the first protein and the C-terminal amino acid of the second protein.

[0160] In engineered GvpC herein described, one or more protease recognition sites can be attached in the GvpC in a configuration which maintains the ability of the GvpC to assemble with other GV proteins of a GVGC to form a gas vesicle as described herein and allow presentation of the protease recognition site for binding on the shell of the correspondent GV type.

[0161] A method is herein described which allows a skilled person to identify gas vesicles and related GvpC proteins (herein also protease sensitive GV and GvpC) which comprise one or more protease recognition site in a protease sensitive configuration allowing formation of GV and cleavage of the GvpC protein by protease able to cleave the one or more recognition site, the cleavage detectable by ultrasound imaging.

[0162] The method to provide a protease sensitive GV and related GvpC comprises providing one or more a engineered gas vesicles each having an initial GV collapse pressure and an initial low or baseline nonlinear ultrasound contrast signal, each gas vesicle comprising a gas enclosed by a protein shell comprising a Gas vesicle GvpA/B protein and an engineered GvpC protein.

[0163] In particular in the method to provide a protease sensitive GV and GvpC, the engineered GvpC is a gas vesicle protein comprising multiple repeat regions within a central portion of the GvpC flanked by an N-terminal region having an N-terminus and a C-terminal region having a C-terminus. The engineered gas vesicle protein GvpC, further comprises at least one protease recognition site inserted within the central portion and/or attached to at least one of the N-terminus and the C-terminus of the GvpC.

[0164] In particular, in embodiments herein described a GvpC herein described is engineered to comprise at least one recognition site within at least one repeat region, a junction and/or at at least one of the N-terminus and the C-terminus.

[0165] Reference is made in this connection to the exemplary illustration of FIG. 4 panel B showing a schematic of an exemplary configuration of a GvpC and related repeat regions within a central portion flanked by the N-terminal region and C-terminal regions (shown FIG. 4 Panel a) and further including protease recognition sites. In particular, in the exemplary illustration of FIG. 4 panel C the insertion of one endoprotease cleavage site within repeat regions and a C-terminus degradation tag are schematically shown.

[0166] Additional attachment points for protease recognition sites are schematically shown, in the illustration of FIG. 4 panel C wherein exemplary attachment sites at the N-terminus, C-terminus within a repast region and/or junction are shown. In particular, it has been surprisingly found that attachment of a protease recognition site within a repeat region and/or at least one of the N-terminus and C-terminus of the GvpC can result in a protease sensitive GvpC and GV (see Examples 1 and Example 2 as well as Example 3 providing proof of principle). It is also expected in view of the results provided in Examples 1 to 3, that insertion of at least a protease recognition site within a junction of the central portion of the GvpC in view of the GvpC configurations as will be understood by a skilled person upon review of the present disclosure.

[0167] In order to that the multiple regions, N-terminal region, C-terminal region and protease recognition sites are in a protease sensitive the method further comprises contacting the one or more engineered gas vesicles with a protease to allow cleavage of the protease recognition site of the the engineered GvpC, and detecting the GV collapse pressure and/or the ultrasound contrast signal of the one or more engineered gas vesicles following the contacting.

[0168] In embodiments of the disclosure, contacting a GV with a protease can be performed either in vitro or in vivo and preferably is performed on a same environment where the protease sensitive GV is used according to the experimental design.

[0169] In some embodiments, contacting the proteas with the protease-sensitive GV can be performed by incubating the protease-sensitive GV with the protease in vitro under certain condition for a certain period of time (Examples 1-2). In some embodiments, the contacting in vitro occurs in a cell transcription-translation system comprising cell extract and plasmids encoding the protease and the contacting can be performed by incubating the cell-free extract with the protease-sensitive GV (Example 3). Additional methods and techniques to contact a GV with a protease in a suitable environment are identifiable by a skilled person upon reading of the present disclosure and/or the disclosures incorporated herein by reference.

[0170] The terms “detect” or “detection” as used herein indicates the determination of the existence, presence or fact of a target in a limited portion of space, including but not limited to a sample, a reaction mixture, a molecular complex and a substrate. The “detect” or “detection” as used herein can comprise determination of chemical and/or biological properties of the target, comprising ability to interact, and in particular bind other compounds, ability to activate another compound and additional properties identifiable by a skilled person upon reading of the present disclosure. The detection can be quantitative or qualitative. A detection is “quantitative” when it refers, relates to, or involves the measurement of quantity or amount of the target or signal (also referred as quantitation), which includes but is not limited to any analysis designed to determine the amounts or proportions of the target or signal. A detection is “qualitative” when it refers, relates to, or involves identification of a quality or kind of the target or signal in terms of relative abundance to another target or signal, which is not quantified. In particular, in embodiments herein described detection of the reportable molecular component comprising a GV type is performed through contrast enhanced imaging techniques and in particular through ultrasound imaging as will be understood by a skilled person.

[0171] In embodiments of the method to provide protease sensitive GV and related GvpC detecting the GV collapse pressure and/or the ultrasound contrast signal of the one or more engineered gas vesicles following the contacting. is performed by applying ultrasound to perform ultrasound imaging of the GV as will be understood by a skilled person upon reading of the instant disclosure.

[0172] The term “ultrasound imaging” or “ultrasound scanning” or “sonography” as used herein indicate imaging performed with techniques based on the application of ultrasound. Ultrasound refers to sound with frequencies higher than the audible limits of human beings, typically over 20 kHz. Ultrasound devices typically can range up to the gigahertz range of frequencies, with most medical ultrasound devices operating in the 1 to 18 MHz range. The amplitude of the waves relates to the intensity of the ultrasound, which in turn relates to the pressure created by the ultrasound waves. Applying ultrasound can be accomplished, for example, by sending strong, short electrical pulses to a piezoelectric transducer directed at the target. Ultrasound can be applied as a continuous wave, or as wave pulses as will be understood by a skilled person.

[0173] Accordingly, the wording “ultrasound imaging” as used herein refers in particular to the use of high frequency sound waves, typically broadband waves in the megahertz range, to image structures in the body. The image can be up to 3D with ultrasound. In particular, ultrasound imaging typically involves the use of a small transducer (probe) transmitting high-frequency sound waves to a target site and collecting the sounds that bounce back from the target site to provide the collected sound to a computer using sound waves to create an image of the target site. Ultrasound imaging allows detection of the function of moving structures in real-time. Ultrasound imaging works on the principle that different structures/fluids in the target site will attenuate and return sound differently depending on their composition. A contrast agent sometimes used with ultrasound imaging are microbubbles created by an agitated saline solution, which works due to the drop in density at the interface between the gas in the bubbles and the surrounding fluid, which creates a strong ultrasound reflection. Ultrasound imaging can be performed with conventional ultrasound techniques and devices displaying 2D images as well as three-dimensional (3-D) ultrasound that formats the sound wave data into 3-D images. In addition to 3D ultrasound imaging, ultrasound imaging also encompasses Doppler ultrasound imaging, which uses the Doppler Effect to measure and visualize movement, such as blood flow rates. Types of Doppler imaging includes continuous wave Doppler, where a continuous sinusoidal wave is used; pulsed wave Doppler, which uses pulsed waves transmitted at a constant repetition frequency, and color flow imaging, which uses the phase shift between pulses to determine velocity information which is given a false color (such as red=flow towards viewer and blue=flow away from viewer) superimposed on a grey-scale anatomical image. Ultrasound imaging can use linear or nonlinear propagation depending on the signal level. Harmonic and harmonic transient ultrasound response imaging can be used for increased axial resolution, as harmonic waves are generated from nonlinear distortions of the acoustic signal as the ultrasound waves insonate tissues in the body. Other ultrasound techniques and devices suitable to image a target site using ultrasound would be understood by a skilled person.

[0174] Applying ultrasound refers to sending ultrasound-range acoustic energy to a target. The sound energy produced by the piezoelectric transducer can be focused by beamforming, through transducer shape, lensing, or use of control pulses. The soundwave formed is transmitted to the body, then partially reflected or scattered by structures within a body; larger structures typically reflecting, and smaller structures typically scattering. The return sound energy reflected/scattered to the transducer vibrates the transducer and turns the return sound energy into electrical signals to be analyzed for imaging. The frequency and pressure of the input sound energy can be controlled and are selected based on the needs of the particular imaging task and, in some methods described herein, collapsing GVs. To create images, particularly 2D and 3D imaging, scanning techniques can be used where the ultrasound energy is applied in lines or slices which are composited into an image.

[0175] In particular, in method to provide a protease sensitive GV and GvpC ultrasound imaging is applied to detect the collapse pressure of the GV and/or the ultrasound contrast signal following contacting of the GV with the protease. Protease sensitive GV and related GvpC are then selected when the collapse pressure of the GV type is decreased and/or a protease induced ultrasound response ultrasound response having a higher non linearity than the initial ultrasound response, are detected following the contacting of the GvpC with the protease.

[0176] In some embodiments, the nonlinear ultrasound image can be an image produced by cross-modulation ultrasound imaging. In some embodiments, the method and system includes determining a buckling pressure of the protease sensitive gas vesicle.

[0177] Exemplary detection of decreased collapse pressure and/or ultrasound response having an higher nonlinearity in protease sensitive GV following contacting with protease are described in the Examples section wherein exemplary methodology and configurations are provided as proof of principle as would be understood by a skilled person.

[0178] In particular, in some embodiments, the protease sensitive GVs can be screened by identifying a decrease in collapse pressure threshold or profile (see e.g. step 4 of FIGS. 5 and 6). As a cleaving or degradation of the GvpC on a GV causes a marked decrease in the collapse profile/threshold of the GV, comparing the GV prior to protease exposure to the GV after protease exposure provides proof that the GvpC was cleaved (that is, that the GV is a protease sensitive GV). See, for example, FIG. 8B. In that example, the non-sensitive GV (−Calp) shows no significant difference in pressure profile between the non-protease exposure (—Ca²⁺) and the protease exposure (+Ca²⁺) situations. Likewise, the GvpC altered (protease sensitive) GV (+Calp) shows no distinct shift in pressure profile (e.g. similar 50% collapse pressure) from the unaltered GVs. However, the altered GV being exposed to the protease (−Calp/+Ca²⁺) shows a shifted collapse profile where the collapse pressures at each % collapse is reduced (˜290 kPa compared to 336-344 kPa). This shows that the protease exposure significantly weakened the GV shell (which is due to the cleavage/degradation of the altered GvpC by the protease because the −Calp/+Ca²⁺ (non-sensitive GV exposed to the protease) profile did not show a similar reduction in collapse pressure profile).

[0179] In some embodiments, the multiple GVs can be tested and the GV with the maximum decrease in pressure profile, while still preventing GV collapse by mere exposure to the protease, can be selected as the protease sensitive GV for imaging contrast.

[0180] In some embodiments, the GVs can be further screened by testing the nonlinear effects of the cleaved GVs by nonlinear ultrasound imaging (see, e.g. FIGS. 8E and 8G) and seeing which protease sensitive GV among a group of different protease sensitive GVs shows the strongest nonlinear contrast (highest contrast to noise ratio, or “CNR”) (see e.g. step 5 of FIGS. 5 and 6).

[0181] In some embodiments, the protease sensitive GVs can be screened by identifying an increase in nonlinear contrast in the GVs after exposure to the protease. See, for example, FIG. 8G. The non-sensitive GV exposed to the protease (−Calp/+Ca²⁺) shows a strong linear contrast to noise ratio (CNR=23.0) but a weak nonlinear ratio (CNR=3.3). The sensitive GV exposed to protease (+Calp/+Ca²⁺) shows a stronger nonlinear ratio (CNR=10.3). Since the only difference between the low contrast and high contrast situations is the alteration of the GvpC of the GV, then this shows that the GV has been made protease sensitive. In some embodiments, the GVs can be further screened by comparing the CNRs of various protease sensitive GVs and seeing which is the highest. In the case of a tie (or close candidates) other factors can be used for selection, such as faster response kinetics and/or greater sensitivity to protease.

[0182] Typically a protease sensitive GV following protease contacting provide an increased nonlinear ultrasound response and are capable of buckling. In particular, protease sensitive GVs when modified by protease present in a host cell and/or target site, buckle and scatter higher harmonics at acoustic pressures above a certain applied ultrasound pressure threshold (buckling threshold). Detection and sensing of such nonlinear behavior occurs, for example, by amplitude modulation (AM) ultrasound pulse sequences in order to image and differentiate the less nonlinear behavior of non-buckling GVs from the enhanced nonlinear behavior of buckling GVs.

[0183] In some embodiments, detection of a protease induced ultrasound response can be performed to select a protease sensitive GV having a desired decrease in collapse pressure and/or a desired increase in nonlinear response (e.g. at/above a desired buckling pressure) to identify protease sensitive GV configured to be used as an acoustic biosensor of protease and/or protease associated event.

[0184] Reference is made to FIG. 5 which shows an exemplary method of functional screening/characterization to identify a protease-sensitive GV configured to act as an acoustic biosensor of enzyme activity. In Step 1, the protease sensitive GvpC variants are designed and cloned as will be understood by a skilled person upon reading of the present disclosure. Once a viable GvpC is identified, Step 2 is the production of protease sensitive GV. This can be done either by replacing or adding protease-sensitive GvpCs to GVs directly (e.g. by stripping the GvpC of a formed GV with urea and then replacing it with the engineered protease-sensitive GvpC), or by expressing protease-sensitive GvpCs as part of a GV gene cluster in a host cell as will be understood by a skilled person upon reading of the present disclosure. Then in Step 3 a change in the mechanical strength (hydrostatic collapse pressure) of the GVs is measured before and after protease exposure. This can be done by preparing a cuvette with the GVs and applying an increasing pressure (in this example, through a nitrogen gas canister controlled by a pressure valve) and observing the OD500 at each pressure increment. Then, in Step 4, the pressure profiles of pressure vs. OD500 (or normalized OD500) can be compared for different variants. The profiles can also be compared to controls such as GVs without GvpC (“no GvpC”) and wild type GvpC GVs (“WT-GvpC”). An GvpC variant can be selected which provides a maximum collapse pressure (e.g. 0.5 normalized OD500) difference between the protease sensitive GV being exposed to protease (+Protease on graph) vs. the protease sensitive GV prior to exposure (−Protease on graph). Alternatively, a minimal difference between no GvpC and +Protease can be selected. Alternatively, a greatest difference between −Protease and wild type can be selected. Alternatively, the minimal difference between the no GvpC and +Protease distance and/or the wild type and -Protease distance can be selected. Alternatively to Steps 3 and 4, one could just test the nonlinear characteristics (e.g. with xAM as described herein) and determine which variant has a nonlinear response above some pressure value (buckling threshold) A refinement of the selection can be made as shown in Step 5, where the GVs are characterized with nonlinear ultrasound imaging. This can identify the protease-sensitive GVs that show a maximum nonlinear CNR enhancement upon exposure to protease.

[0185] Reference is also made to the exemplary illustration of FIG. 6 shows an example refinement of the example given in FIG. 5 of functional screening/characterization to identify an optimal protease-sensitive GV to act as an acoustic biosensor of enzyme activity. For Step 1, one can insert one or more protease recognition sequences (e.g. using options 1-4 shown for FIG. 4C). In some embodiments, protease-sensitive GvpC gene can be cloned on its own or as part of a GV gene cluster having other GV genes such as Ana GvpA and Mega GvpR-U. For Step 2, engineered protease-sensitive GvpC can be added to GVs that have some or all of their native GvpC removed or to a GV lacking a GvpC. Also, protease-sensitive GvpCs can be expressed along with other GV-forming genes/GV gene clusters in prokaryotic (e.g. bacteria) or eukaryotic (e.g. mammalian) cells. Step 3 can be performed using any method that provides a measure of the mechanical stiffness of the protease-sensitive GV shell, for example: Collapse spectrometry—this technique measures the optical density of Gas Vesicles as a function of increasing applied hydrostatic pressure to determine their collapse pressure profile. When proteases act on the GVs, their collapse pressure decreases. For Step 4, the protease-sensitive GvpC variants should be able to bind to and mechanically strengthen the GV shell (measured by a higher collapse pressure threshold before protease exposure AND/OR by comparing the nonlinear CNR). In some cases, the ideal protease-sensitive GvpC confers the GV with mechanical properties similar to its wild-type control (Non-protease sensitive GvpC without the recognition sequence). If collapse pressure is used, then select the maximum possible decrease in collapse pressure (or mechanical stiffness) after exposure to target protease, without compromising GV shell integrity (protease treatment should not lead to GV collapse. For Step 5, identify protease-sensitive GVs that show maximum enhancement in nonlinear acoustic contrast upon exposure/treatment with target protease. In specific instances where two protease-sensitive GvpC variants provide comparable enhancement of nonlinear signal, choose the variant that shows faster response kinetics and/or greater sensitivity to protease. Accordingly, in some embodiment the method of providing protease sensitive Gas Vesicles can by producing and screening protease sensitive gas vesicles (GVs), In those embodiments the method comprises:
[0186] designing a plurality of protease sensitive GvpC;
[0187] cloning the plurality of protease sensitive GvpC;
[0188] producing GVs with the plurality of protease sensitive GvpC, creating GV and GvpC combinations;
[0189] measuring the mechanical stiffness of the GVs over a range of pressures for each of the plurality of GvpCs;
[0190] and determining which GV and GvpC combination provides a largest shift in collapse pressure based on the measuring with techniques and methodologies identifiable by a skilled person upon reading of the present disclosure. In some of those embodiments, the method can further comprise identifying which GV and GvpC combination has a maximum nonlinear contrast to noise ratio under nonlinear ultrasound imaging.

[0191] In some embodiment the producing and screening protease sensitive gas vesicles (GVs), can comprise:
[0192] designing a plurality of protease sensitive GvpC;
[0193] cloning the plurality of protease sensitive GvpC;
[0194] producing GVs with the plurality of protease sensitive GvpC, creating GV and GvpC combinations;
[0195] measuring the nonlinear ultrasound response over a range of pressures for each of the plurality of GvpCs;
[0196] and determining which GV and GvpC combination provides the maximum nonlinear ultrasound imaging contrast to noise ratio before and after exposure to the protease.
   with techniques and methodologies identifiable by a skilled person upon reading of the present disclosure. In some of those embodiments, the method can further comprise identifying which GV and GvpC combination has a maximum nonlinear contrast to noise ratio under nonlinear ultrasound imaging.

[0197] In some embodiments GVs engineered for GvpC cleaving by protease can be selected to presents optimal nonlinear acoustic response imaging or optimal change in collapse pressure. For example, for nonlinear acoustic response FIG. 10F shows a nonlinear CNR increase from 15.9 to 22.6, or over a 40% increase in CNR. Other examples show even higher CNR increase—FIG. 9E shows an 860% increase in CNR. For the collapse pressure example, FIG. 9D shows a reduction of “50% collapse” pressure from about 476 kPa to about 223 kPa or over a 50% decrease in collapse pressure. These strong imaging differences between pre- and post-protease exposure allow these particular type of GVs to be used as ultrasound contrast agents for detection of protease activity.

[0198] Additional screening approaches that can be used to perform the detecting the GV collapse pressure and/or the ultrasound contrast signal of the one or more engineered Gas Vesicles following the contacting and the selecting can be identified by a skilled person.

[0199] Exemplary recognition sequences and cleavage sites known or expected to be included in protease sensitive GV and GvpC are shown in Table 6. / forward slash (/) indicates where protease cleaves the protein sequence.

TABLE 6
Recognition sequences and cleavage sites of exemplary proteases

| Enzyme Name | Sequence and Cleavage | SEQ ID NO |
|---|---|---|
| Human Rhinovirus (HRV) 3C Protease | LEVLFQ/GP | 53 |
| Enterokinase | DDDDK/ | 54 |
| Factor Xa | IEGR/ | 55 |
| Tobacco etch virus protease | ENLYFQ/G | 56 |
| (TEV protease) | | |
| Thrombin | LVPR/GS | 57 |
| Calpain | QQEVY/GMMPRD | 58 |
| MMP2/9 | PLG/LAG or PQG/IAAQ, GPLGVRGY | 59-61 |
| | [28, 29] | |
| Urokinase | SGR/SAG or LGGSGR/SANAILEGSG | 62-63 |

[0200] Additional exemplary protease cleavage sites include caspases 1-10 and matrix metalloproteinases (MMPs), neprilysin, cathepsins, tissue plasminogen activator, plasmin, prostate specific antigen (//web.expasy.org/peptide_cutter/peptidecutter_enzymes.html) and additional proteases having one or more correspondence recognition sites identifiable by a skilled person upon reading of the present disclosure.

[0201] In particular, protease recognition sites can be identified in view of known cleavage specificities of the related protease that can be found in public databases such as Expasy at web.expasy.org/peptide_cutter/peptidecutter_enzymes.html. Table 7 provides an exemplary list of the cleavage specificities of exemplary proteases in the sense of the disclosure as will be understood by a skilled person.

TABLE 7
Exemplary list of the cleavage specificities of selected enzymes

| Enzyme Name | P4 | P3 | P2 | P1 | P1′ | P2′ |
|---|---|---|---|---|---|---|
| Arg-C proteinase | — | — | — | R | — | — |
| Asp-N endopeptidase | — | — | — | — | D | — |
| BNPS-Skatole | — | — | — | W | — | — |
| Caspase 1 | F, W, Y, or L | — | H, A or T | D | not P, E, D, | — |
| | | | | | Q, K or R | |
| Caspase 2 | D | V | A | D | not P, E, D, | — |
| | | | | | Q, K or R | |
| Caspase 3 | D | M | Q | D | not P, E, D, | — |
| | | | | | Q, K or R | |
| Caspase 4 | L | E | V | D | not P, E, D, | — |
| | | | | | Q, K or R | |
| Caspase 5 | L or W | E | H | D | — | — |
| Caspase 6 | V | E | H or I | D | not P, E, D, | — |
| | | | | | Q, K or R | |
| Caspase 7 | D | E | V | D | not P, E, D, | — |
| | | | | | Q, K or R | |
| Caspase 8 | I or L | E | T | D | not P, E, D, | — |
| | | | | | Q, K or R | |
| Caspase 9 | L | E | H | D | — | — |
| Caspase 10 | I | E | A | D | — | — |
| Chymotrypsin-high | — | — | — | F or Y | Not P | — |
| specificity (C-term to | — | — | — | W | Not M or P | — |
| [FYW], not before P) | — | — | — | F, L or Y | Not P | — |
| Chymotrypsin-low | — | — | — | W | not M or P | — |
| specificity (C-term to | — | — | — | M | not P or Y | — |
| [FYWML], not | — | — | — | H | not D, M, | — |
| before P) | | | | | P or W | |
| Clostripain | — | — | — | R | — | — |
| (Clostridiopeptidase B) | | | | | | |
| CNBr | — | — | — | M | — | — |
| Enterokinase | D or E | D or E | D or E | K | — | — |
| Factor Xa | A, F, G, I, L, | D or E | G | R | — | — |
| | T, V or M | | | | | |
| Glutamyl | — | — | — | E | — | — |
| endopeptidase | | | | | | |
| GranzymeB | I | E | P | D | — | — |
| LysC | — | — | — | K | — | — |
| Neutrophil elastase | — | — | — | A or V | — | — |
| Pepsin (pH 1.3) | — | not H, K, or R | NOT P | NOT R | F or L | Not P |
| | — | Not H, K, or R | Not P | F or L | — | Not P |
| Pepsin (pH >2) | — | Not H, K or R | Not P | Not R | F, L, W or Y | Not P |
| | | Not H, K or R | Not P | F, L, W or Y | | Not P |
| Proline- | — | — | H, K or R | P | Not P | — |
| endopeptidase | | | | | | |
| Proteinase K | — | — | — | A, E, F, I, L, | — | — |
| | | | | T, V, W or Y | | |
| Staphylococcal | — | — | NOT E | E | — | — |
| peptidase I | | | | | | |
| Thermolysin | — | — | — | Not D or E | A, F, I, L, | — |
| | | | | | M or V | |
| | — | — | G | R | G | — |
| Thrombin | A, F, G, I, L, | A, F, G, I, L, | P | R | not D or E | Not DE |
| | T, V or M | T, V, W or A | | | | |
| Trypsin | — | — | W | K | P | — |
| | — | — | M | R | P | — |

Note:
Amino acid residues in a substrate undergoing cleavage are designated P1, P2, P3, P4 etc. in the N-terminal direction from the cleaved bond. Likewise, the residues in C-terminal direction are designated P1′, P2′, P3′, P4′. etc.

[0202] In preferred embodiments, the proteases and corresponding recognition site comprise the MMP family of proteases, the Caspase family of proteases, mflon, ubiquitin, TEV, Calpain and ClpXP.

[0203] In embodiments, herein described the point of insertion and modality of insertion of the cleavage site with or without linkers is chosen such that it meets the following criteria: 1) it does not destroy the ability of GvpC to bind to the GV 2) It does not destroy the ability of GvpC to strengthen the GV shell 3) It provides the maximum difference (decrease) in GV collapse pressure before and after exposure to the protease—which can cut the inserted cleavage site/recognition motif.

[0204] Accordingly, in some embodiments, the one or more protease recognition site are preferably inserted within one or more repeats regions of the GvpC protein. More preferably the protease recognition site can be an endoprotease and/or a processive protease recognition site inserted within the second repeat in an N-terminus to C-terminus direction (see the schematic of FIG. 4C), in between repeat regions and/or after the last repeat before the C-terminal region.

[0205] In preferred embodiments, the protease recognition site (e.g. cleavage sites and/or degradation tag) are attached to the GvpC at at least one of the related N-terminus or C-terminus through a linker polypeptide.

[0206] The term “linker polypeptide” or “linker” as used herein indicates a short peptide sequences that occur between protein domains. Linkers are often composed of flexible residues such as glycine and serine so that the adjacent protein domains are free to move relative to one another.

[0207] A linker polypeptide in accordance with the disclosure can have a length that can be selected in view of the target environment and the construct where the gas vesicles of the instant disclosure are to be included and the experimental design. In particular, in the engineered gas vesicles herein described linkers are typically peptide of 2-20 residues as will be understood by a skilled person.

[0208] Exemplary linkers include GSGSGSG(SEQ ID NO: 64), GGGGS (SEQ ID NO: 65), GSGSG (SEQ ID NO: 66), GGGG (SEQ ID NO: 67), GGG(SEQ ID NO: 68), GG(SEQ ID NO 69), GS (SEQ ID NO: 70), GSGS(SEQ ID NO: 71), GGGS(SEQ ID NO: 72), GGS(SEQ ID NO: 73), GTS (SEQ ID NO: 74) GGSGGS (SEQ ID NO: 75), GGG (SEQ ID NO: 76), GGGGGG (SEQ ID NO: 77), GGGGGGGGG (SEQ ID NO: 78), GGGGGGGGGGGG (SEQ ID NO: 79), GGGGGGGGGGGGGGG (SEQ ID NO: 80), GGS(SEQ ID NO: 81), GGSGGS(SEQ ID NO: 82), GGSGGSGGS (SEQ ID NO: 83), GGSGGSGGSGGS (SEQ ID NO: 84), GGSGGSGGSGGSGGS (SEQ ID NO: 85), GSG (SEQ ID NO: 86), GSGGSG (SEQ ID NO: 87), GSGGSGGSG(SEQ ID NO: 88), GSGGSGGSGGSG (SEQ ID NO: 89), GSGGSGGSGGSGGSG (SEQ ID NO: 90), GGGGS(SEQ ID NO: 91), GGGGSGGGGS (SEQ ID NO: 92), GGGGSGGGGSGGGGS (SEQ ID NO: 93), GGGGSGGGGSGGGGSGGGGS (SEQ ID NO: 94), GGGGSGGGGSGGGGSGGGGSGGGGS (SEQ ID NO: 95) and additional polypeptide linkers identifiable by a skilled person.

[0209] In protease sensitive GvpC, at least one linker polypeptides can be used to perform an indirect attachment of the target site and/or degradation tag to the GvpC. In particular, a cleavage site can be inserted in a repeat region, by attaching two adjacent amino acids in the repeat region directly or indirectly through at least one linker attaching at the N-terminal region of the cleavage site to a first of the two adjacent amino acid and the C-terminal region of the cleavage site to the second of the two adjacent amino acid.

[0210] In some embodiments, the protease recognitions site can be engineered in the GvpC in addition or in place of sequences of the repeat regions depending on the GvpC and the configuration required to allow formation of a GV.

[0211] In some embodiments, in particular, when the protease recognition site and optionally the linker are not greater than 20 residues, the one or more protein recognition site can be inserted in the GvpC without removal of existing residues. In some examples, the one or more protein recognition site with or without linker is inserted while removing part of the internal repeat sequence such that the overall length of the modified repeat remains unchanged. In other examples, the one or more protein recognition site with or without linker is inserted while removing part of the internal repeat sequence such that the overall length of the modified repeat is changed.

[0212] In some embodiments, where the protein recognition site are attached to the N-terminus and/or the C-terminus, degrons of various kinds can be attached to either terminus of the GvpC directly or through linkers. Preferably, degrons tethered to GvpC are not larger than the GvpC itself. Preferably linkers of different length and amino acid composition are recommended to be screened according to the aforementioned method for optimal tethering of larger recognition sequences. Commonly used degrons can be tethered to GvpC with any mutations which maintain the degrons ability to be cleaved by the corresponding protease.

[0213] Exemplary GvpC that can be engineered to provide protease sensitive GvpC herein described are reported in Table 8 which shown amino acid sequences of exemplary GvpC proteins from several exemplary prokaryotic species. In particular, these exemplary amino acid sequences can be used as reference amino acid sequences in some embodiments for homology-based searches for related GvpC proteins.

TABLE 8
Protein sequences of gvpC from exemplary species:

| | UniProt | | SEQ |
|---|---|---|---|
| Species | ID No. | Amino acid Sequence | ID NO: |
| Anabaena flos- | P09413 | MISLMAKIRQEHQSIAEKVAELSLETREFLSVTTAKRQEQAEKQAQEL | 96 |
| aquae | | QAFYKDLQETSQQFLSETAQARIAQAEKQAQELLAFHKELQETSQQF | |
| | | LSATAQARIAQAEKQAQELLAFYQEVRETSQQFLSATAQARIAQAEK | |
| | | QAQELLAFHKELQETSQQFLSATADARTAQAKEQKESLLKFRQDLFV | |
| | | SIFG | |
| Halobacterium | P24574 | MSVTDKRDEMSTARDKFAESQQEFESYADEFAADI | 97 |
| salinarurn | | TAKQDDVSDLVDAITDFQAEMTNTTDAFHTYGDE | |
| | | FAAEVDHLRADIDAQRDVIREMQDAFEAYADIFAT | |
| | | DIADKQDIGNLLAAIEALRTEMNSTHGAFEAYADD | |
| | | FAADVAALRDISDLVAAIDDFQEEFIAVQDAFDNY | |
| | | AGDFDAEIDQLHAAIADQHDSFDATADAFAEYRD | |
| | | EFYRIEVEALLEAINDFQQDIGDFRAEFETTEDAFV | |
| | | AFARDFYGHEITAEEGAAEAEAEPVEADADVEAE | |
| | | AEVSPDEAGGESAGTEEEETEPAEVETAAPEVEGSP | |
| | | ADTADEAEDTEAEEETEEEAPEDMVQCRVCGEYY | |
| | | QAITEPHLQTHDMTIQEYRDEYGEDVPLRPDDKT | |
| | | MSVKDKREKMTATREEFAEVQQAFAAYADEFAA | |
| Halobacterium | Q02228 | DVDDKRDVSELVDGIDTLRTEMNSTNDAFRAYSE | 98 |
| mediterranei | | EFAADVEHFHTSVADRRDAFDAYADIFATDVAEM | |
| | | QDVSDLLAAIDDLRAEMDETHEAFDAYADAFVTD | |
| | | VATLRDVSDLLTAISELQSEFVSVQGEFNGYASEFG | |
| | | ADIDQFHAVVAEKRDGHKDVADAFLQYREEFHGV | |
| | | EVQSLLDNIAAFQREMGDYRKAFETTEEAFASFAR | |
| | | DFYGQGAAPMATPLNNAAETAVTGTETEVDIPPIE | |
| | | DSVEPDGEDEDSKADDVEAEAEVETVEMEFGAEM | |
| | | DTEADEDVQSESVREDDQFLDDETPEDMVQCLVC | |
| | | GEYYQAITEPHLQTHDMTIKKYREEYGEDVPLRPD | |
| | | DKA | |
| Microchaete | P08041 | MTPLMIRIRQEHRGIAEEVTQLFKDTQEFLSVTTAQ | 99 |
| diplosiphon | | RQAQAKEQAENLHQFHKDLEKDTEEFLTDTAKER | |
| | | MAKAKQQAEDLFQFHKEMAENTQEFLSETAKER | |
| | | MAQAQEQARQLREFHQNLEQTTNEFLADTAKERM | |
| | | AQAQEQKQQLHQFRQDLFASIFGTF | |
| Nostoc sp. | Q8YUS9 | MTALMVRIRQEHRSIAEEVTQLFRETHEFLSATTA | 100 |
| | | HRQEQAKQQAQQLHQFHQNLEQTTHEFLTETTTQ | |
| | | RVAQAEAQANFLHKFHQNLEQTTQEFLAETAKNR | |
| | | TEQAKAQSQYLQQFRKDLFASIFGTF | |

[0214] Exemplary engineering of the exemplary GvpC of Anaboena flos aquae are reported in Table 9 below.

TABLE 9
Protein sequences of gvpC from exemplary species:

| | UniProt | | SEQ |
|---|---|---|---|
| Species | ID No. | Amino acid Sequence | ID NO: |
| Anabaena flos- | | MISLMAKIRQEHQSIAEKVAELSLETREFLSVTTAK | 101 |
| aquae (TEV | | RQEQAEKQAQELQAFYKDLQETSQQFLSETAGSGS | |
| sensitive) | | GSGENLYFQGSGSGSGFHKELQETSQQFLSATAQA | |
| | | RIAQAEKQAQELLAFYQEVRETSQQFLSATAQARI | |
| | | AQAEKQAQELLAFHKELQETSQQFLSATADARTA | |
| | | QAKEQKESLLKFRQDLFVSIFG | |
| Anabaena flos- | | MGISLMAKIRQEHQSIAEKVAELSLETREFLSVTTA | 102 |
| aquae (calpain | | KRQEQAEKQAQELQAFYKDLQETSQGSGSGQQEV | |
| sensitive) | | YGMMPRDGSGSGQAQELLAFHKELQETSQQFLSA | |
| | | TAQARIAQAEKQAQELLAFYQEVRETSQQFLSATA | |
| | | QARIAQAEKQAQELLAFHKELQETSQQFLSATADA | |
| | | RTAQAKEQKESLLKFRQDLFVSIFG | |
| Anabaena flos- | | MG [symbol] SGISLMAKIRQEHQSIAEKVAELSLET | 2 |
| aquae (ClpXP | | REFLSVTTAKRQEQAEKQAQELQAFYKDLQETSQ | |
| sensitive) | | QFLSETAQARIAQAEKQAQELLAFHKELQETSQQF | |
| | | LSATAQARIAQAEKQAQELLAFYQEVRETSQQFLS | |
| | | ATAQARIAQAEKQAQELLAFHKELQETSQQFLSAT | |
| | | ADARTAQAKEQKESLLKFRQDLFVSIFGSGAANDE | |
| | | NYALAA | |

Underlined fonts: inserted sequence; bold fonts: protease recognition sequences; italic fonts: linker; bold italic fonts: tag sequence

[0215] A representation of the exemplary GvpC of Table 9 also showing the N-terminal region, C-terminal region and repeats is provided in Tables 10-11 below.

TABLE 10
GvpC in engineered Anabaena flos-aquae GvpC (TEV-sensitive)

| Position | Sequence | SEQ ID NO |
|---|---|---|
| N-terminus | MISLMAKIRQEHQSIAEK | 103 |
| Repeat 1 | VAELSLETREFLSVTTAKRQEQAEKQAQELQAF | 104 |
| Repeat 2 | YKDLQETSQQFLSETAGSGSGSGENLYFQGSGSGSGF | 105 |
| Repeat 3 | HKELQETSQQFLSATAQARIAQAEKQAQELLAF | 106 |
| Repeat 4 | YQEVRETSQQFLSATAQARIAQAEKQAQELLAF | 107 |
| Repeat 5 | HKELQETSQQFLSATADARTAQAKEQKESLLKF | 108 |
| C-terminus | RQDLFVSIFG | 109 |

ENLYFQ/G-TEV recognition sequence; GSGSGSG-linker

TABLE 11
Sequence alignment of the repeat sequences of GvpC in engineered
Anabaena flos-aquae GvpC (calpain-sensitive)

| Position | Sequence | SEQ ID NO |
|---|---|---|
| N-terminus | MISLMAKIRQEHQSIAEK | 110 |
| Repeat 1 | VAELSLETREFLSVTTAKRQEQAEKQAQELQAF | 111 |
| Repeat 2 | YKDLQETSQGSGSGQQEVYGMMPRDGSGSGQAQELLAF | 112 |
| Repeat 3 | HKELQETSQQFLSATAQARIAQAEKQAQELLAF | 113 |
| Repeat 4 | YQEVRETSQQFLSATAQARIAQAEKQAQELLAF | 114 |
| Repeat 5 | HKELQETSQQFLSATADARTAQAKEQKESLLKF | 115 |
| C-terminus | RQDLFVSIFG | 116 |

QQEVY/GMMPRD-Calpain recognition sequence; GSGSG-linker

[0216] In some embodiments, engineered protease sensitive GvpC can be further engineered to include additional tags or labels (e.g. reporter protein GFP) to confirm aspects such as protein translocation or other functions with techniques such as the ones described in U.S. application Ser. No. 15/663,635 published as US 2018/0030501 incorporated herein by reference in its entirety.

[0217] An exemplary engineered protease sensitive GvpC further comprising a HIS tag is reported in Table 12 below.

TABLE 12
GvpC in engineered Anabaena flos-aquae GvpC (ClpXP-sensitive)

| Position | Sequence | SEQ ID NO |
|---|---|---|
| N-terminus | MGHHHHHHSGISLMAKIRQEHQSIAEK | 117 |
| Repeat 1 | VAELSLETREFLSVTTAKRQEQAEKQAQELQAF | 118 |
| Repeat 2 | YKDLQETSQQFLSETAQARIAQAEKQAQELLAF | 119 |
| Repeat 3 | HKELQETSQQFLSATAQARIAQAEKQAQELLAF | 120 |
| Repeat 4 | YQEVRETSQQFLSATAQARIAQAEKQAQELLAF | 121 |
| Repeat 5 | HKELQETSQQFLSATADARTAQAKEQKESLLKF | 122 |
| C-terminus | RQDLFVSIFGSGAANDENYALAA | 123 |

AANDENYALAA-ClpXP degron/ClpXP recognition sequence; SG-linker; HHHHHH-Histidine tag for purification

[0218] In general, protease sensitive GvpC can be provided with methods and techniques such as the ones indicated in U.S. application Ser. No. 15/663,635 published as US 2018/0030501 incorporated herein by reference in its entirety in in U.S. application Ser. No. 16/736,683 filed on Jan. 7, 2020 and in PCT/US2020/012572 filed on Jan. 7, 2020 published as WO/2020/146379 each incorporated herein by reference in its entirety as well as additional techniques known and identifiable by a skilled person.

[0219] In some embodiments, the engineered GvpC variants are obtained by further linking the native GvpC protein to one or more proteases and/or liner polypeptides herein described to form a recombinant fusion protein.

[0220] Recombinant fusion proteins can be created artificially using recombinant DNA technology identifiable by a person skilled in the art of molecular biology. In general, the methods for producing recombinant fusion proteins comprise removing the stop codon from a cDNA or genomic sequence, such as a polynucleotide coding for a GvpC protein or a derivative thereof, then appending the cDNA or genomic sequence of the second protein in frame through ligation or overlap extension PCR. Optionally, PCR primers can further encode a linker of one or more amino acids residues and/or a PCR primer-encoded protease cleavage site placed between two proteins, polypeptides, or domains or parts thereof. The resulting DNA sequence will then be expressed by a prokaryotic cell as a single protein. A fusion protein can also comprise a linker of one or more amino acids residues, which can enable the proteins to fold independently and retain functions of the original separate proteins or polypeptides or domains or parts thereof. Linkers in protein or peptide fusions can be engineered with protease cleavage sites that can enable the separation of one or more proteins, polypeptides, domains or parts thereof from the rest of the fusion protein. Other methods for genetically engineering these recombinant fusion proteins include Site Directed Mutagenesis (e.g. using Q5 Site-Directed Mutagenesis Kit from NEB or the QuickChange Lightning Kit from Agilent), Gibson Assembly (e.g. using the NEB Hi-Fi DNA Assembly Kit), Error-prone PCR (e.g. Mutazyme from Agilent) and Golden-Gate assembly (e.g. using the NEB Golden Gate Assembly Mix).

[0221] Accordingly, an engineered gene encoding for a GvpC herein described can be used to provide the protease sensitive GvpC e.g. through inclusion in a suitable gene expression cassette and its use for expression in a host cell, e.g. a prokaryotic cell.

[0222] A “gene expression cassette” is a gene cassette comprising regulatory sequence to be expressed by a transfected cell. Following transformation, the expression cassette directs the cell's machinery to make RNA and proteins. Some expression cassettes are designed for modular cloning of protein-encoding sequences so that the same cassette can easily be altered to make different proteins. An expression cassette is composed of one or more genes and the sequences controlling their expression. An expression cassette typically comprises at least three components: a promoter sequence, an open reading frame, and a 3′ untranslated region that, in eukaryotes, usually contains a polyadenylation site. An expression cassette can be formed by manipulable fragment of DNA carrying, and capable of expressing, one or more genes of interest optionally located between one or more sets of restriction sites Gene expression cassettes as used herein typically comprise further regulatory sequences additional to the prompter to regulated the expression of the gene or genes within the open reading frame herein also indicated as coding region of the cassette.

[0223] In some embodiments, a protease sensitive GvpC can be produced by engineering a gvpC protein from any species that encodes a gvpC protein in its genome, or a synthetically designed gvpC protein. In some embodiments, the gvpC protein is a gvpC protein from Anabaena flos-aquae, Halobacterium salinarum, Halobacterium mediterranei, Microchaete diplosiphon or Nostoc sp., or homologs thereof, and others identifiable by a skilled person.

[0224] In some embodiments, addition of a degradation tag can be performed an in-frame insertion or C- or N-terminal fusion of the degradation tag to a gvpC. An in-frame insertion can be performed in several steps, by first providing the gvpC-coding and the degradation tag-coding polynucleotides and performing the insertion by breaking a bond (typically a phosphodiester bond) between two adjacent nucleotide bases of the first polynucleotide and then forming new bonds between the gvpC-coding polynucleotide and the degradation tag-coding polynucleotide. For example, the gvpC coding polynucleotide can be digested with one or more restriction endonucleases and then the degradation tag-coding polynucleotide inserted by ligation (e.g., using T7 DNA ligase) into compatible site(s) allowing formation of phosphodiester bonds between the first and second polynucleotide bases. Compatible DNA ligation sites can be “sticky” ends, digested with restriction endonuclease producing an overhang (e.g. EcoRI), or can be “blunt ends” with no overhang, as would be understood by those skilled in the art. A fusion of a polynucleotide encoding a tag can also be ligated to an N- or C-terminus of a gvpC or a variant gvpC polynucleotide by ligation (e.g., using T7 DNA ligase) into compatible site(s).

[0225] In some embodiments, the gvpC- and the degradation tag-coding polynucleotides can be provided within a single polynucleotide by design. For example, a tag can be added by inserting the polynucleotide encoding a protein of interest in a plasmid or vector that has the tag ready to fuse at the N-terminus or C-terminus. The tag can be added using PCR primers encoding the degradation tag; using PCR the tag can be fused to the N-terminus or C-terminus of the protein-coding polynucleotide, or can be inserted at an internal location, using internal epitope tagging (see e.g. ref [30]), among other methods known to those skilled in the art. Other methods such as overlap extension PCR and infusion HD cloning can be used to insert a tag at a site between the N-terminus and C-terminus of a protein-coding polynucleotide (see Examples of U.S. application Ser. No. 15/613,104). Optionally, a polynucleotide encoding a ‘linker’ (such as a sequence encoding a short polypeptide or protein sequence, e.g., gly-gly-gly or gly-ser-gly can be placed between the protein of interest and the tag; this can be useful to prevent the tag from affecting the activity of the protein being tagged.

[0226] In embodiments herein described, the Gas Vesicle that is engineered can be a naturally occurring gas vesicle formed by naturally occurring Gv proteins or can be a hybrid gas vesicle formed by Gv proteins from different naturally occurring GVs. In embodiments herein described, the GV can be engineered so that a protease sensitive GvpC can be included in a GV in place of an existing GvpC of the cluster or in addition to GVA and GVS of clusters which do not include GvpCs. The location and configuration of the cleavage site and/or degradation tag in engineered protease sensitive GvpC of the present disclosure results in inclusion of the GvpC in the formed GV in a configuration in which the at least one endoprotease cleavage site and/or the exoprotease specific protease recognition sites are presented on the protein shell of the engineered protease sensitive gas vesicle as will be understood by a skilled person.

[0227] The term “present” as used herein with reference to a compound or moiety indicates attachment performed to maintain the chemical reactivity of the compound or moiety as attached. Accordingly, a cleavage site or degradation tag presented on an GV shell, is able to perform under the appropriate conditions the one or more chemical reactions that chemically characterize the cleavage site or degradation which here comprise at least ability to be cleaved by a protease in the sense of the disclosure.

[0228] In some embodiments, addition of the GvpC can be performed at a protein level by isolating a GV, removing a GvpC (e.g. through urea stripping) and performing GvpC re-addition as described in [31, 32] (see also Examples section). In some other embodiments, GvpC can be added to a formed GV that does not have a GvpC (e.g. Mega GV) through similar process without the step of removing a GvpC.

[0229] In some embodiments, a protease sensitive GV can be provided by providing an engineered protease sensitive GVGC, in which the GVS genes of the protease sensitive GVGC comprise a genetically engineered protease sensitive gvpC gene encoding for a protease sensitive GvpC protein of the instant disclosure.

[0230] Accordingly, in embodiments herein described, GVGC can be selected based on desired properties of the corresponding GV type. In particular, to this extent, a skilled person can use naturally occurring GVGC, can provide engineered GVGC wherein some of the naturally occurring gyp genes are omitted, and/or can provide hybrid GVGC in which GVAs and GVS genes of naturally occurring GVGCs are combined to provide GV types having the shape and dimensions resulting in the desired properties in particular acoustic properties as will be understood by a skilled person upon reading of the present disclosure.

[0231] Several detectable GVGC with one or more detection method of interests have been identified and can be used for production of GV types in various cells through various genetically engineered constructs as will be understood by a skilled person upon reading of the present disclosure and U.S. application Ser. No. 15/663,635 published as US 2018/0030501 herein incorporated by reference in its entirety.

[0232] In some embodiments described herein GVGC of the instant disclosure can be naturally occurring combination of gyp genes which can have a naturally occurring sequence or a sequence modified to optimize the expression in the cell where detection is to be performed. For example GVGC clusters of the instant disclosure comprise a GVGC of B. megaterium formed by the gvpA or gvpB genes, gvpR, gvpN gvpF, gvpG, gvpL gvpS, gvpK, gvpJ, gvpT, gvpU of B. megaterium, or the GVGC of Anaboena Flos Aquae formed by the gvpA or gvpB genes of Anaboena Flos Aquae (see e.g. the sequences in Table 14 of Example 9) and the GVA gvpC, gvpN, gvpJ, gvpK, gvpF, gvpG, gvpV, gvpW of Anaboena Flos Aquae (see e.g. sequences in Table 18 of Example 9).

[0233] The gyp genes in one or more genes of the GVGC cluster of the present disclosure can have a naturally occurring sequence or a sequence modified to optimize the expression in the cell where detection is to be performed. For example a B. megaterium GVGC can have a gvpA or gvpB genes having the sequences in Table 14 of Example 9, and/or any one of the gvpR, gvpN gvpF, gvpG, gvpL gvpS, gvpK, gvpJ, gvpT, gvpU genes having the sequences in Table 16 of Example 9. Similarly, an Anaboena Flos Aquae GVGC can have the gvpA or gvpB genes having the sequences reported in Table 14 of Example 9 and/or any one of the gvpC, gvpN, gvpJ, gvpK, gvpF, gvpG, gvpV, gvpW having the. sequences reported in Table 18 of Example 9.

[0234] In some embodiments, described herein, GVGC of the instant disclosure can be engineered protease sensitive version of naturally occurring GV gene clusters. An example is provided by the GVGC of B. megaterium comprising gvpB, gvpR, gvpN gvpF, gvpG, gvpL gvpS, gvpK, gvpJ, gvpT, gvpU wherein the gvpR and gvpT genes of the naturally occurring GVGC from B. megaterium have been omitted (see e.g. the sequences reported in Example 6 of the co-pending U.S. application Ser. No. 16/736,683 and Example 3 of the instant disclosure). Another example is provided by GV gene clusters comprising gvpA, Ana-gvpC gvpN, gpvJ, gvpK, gvpF, gvpG, gvpW, and gvpV from Anabaena flos-aquae or GV gene clusters comprising gvpA+gvpN, gpvJ, gvpK, gvpF, gvpG, gvpW, gvpV from Anabaena flos-aquae (see Anabaena flos-aquae genes in Table 18 of Example 9 of the present disclosure).

[0235] In other embodiments described herein, GVGC of the instant disclosure can be modified protease sensitive variant of a hybrid GV gene cluster in a Gas Vesicle expression system of the disclosure, can comprise a combination of genes from A. flos-aquae (herein also Ana-gyp) and genes from B. megaterium (herein also Mega-gyp). In particular, in exemplary embodiments, the hybrid GV gene cluster can comprise B. megaterium GVA assembly genes gvpR, gvpN, gvpF, gvpG, gvpL, gvpS, gvpK, gvpJ, gvpT and gvpU and further comprise structural gvpA gene from Anabaena flos-aquae. In some of those embodiments, the hybrid GV gene cluster can comprise gvpA, gvpC from Anabaena flos-aquae and GVA genes from B. megaterium possibly excluding gvpR and/or gvpT. In some of those embodiments, the hybrid GV gene cluster can comprise Ana-gvpA and mega GVA genes possibly excluding gvpR and/or gvpT. In some embodiments GVGC of the instant disclosure can include gvpA, gvpC, gvpN from Anabaena flos-aquae and GVA genes from B. megaterium, as well as other combinations identifiable by a skilled person upon reading of the present disclosure.

[0236] In some embodiments herein described, a GVGC comprising gyp genes A/B, C and N (gvpA/B, gvpC, gvpN genes) from a same or different prokaryote. Preferably the GVGC comprises a gvpN gene as presence of gvpN protein results in an increased detectability of the related GV type.

[0237] For example, in one exemplary embodiment, all the gyp genes B, N, F, G, L, S, K, J and U are from B. megaterium. GVs from B. megaterium are typically cone-tipped cylindrical structures with a diameter of approximately 73 nm and length of 100-600 nm, encoded by a cluster of eleven or fourteen different genes, including the primary structural protein, gvpB, and several putative minor components and putative chaperones [33, 34] as would be understood by a person skilled in the art.

[0238] In some embodiments, some of the set of nine gyp genes can be from Bacillus megaterium and the rest genes are from Anabaena flos-aquae such as the GVGC comprising Ana-A, Ana-C, Ana-N, mega: gvpF, gvpG, gvpL, gvpS, gvpK, gvpJ, gvpT and gvpU with/without gvpR and gvpT, and additional examples identifiable by a skilled person upon reading of the present disclosure (see Example 9 of the present disclosure and Example 5 of the co-pending U.S. application Ser. No. 16/736,683).

[0239] In some embodiments, the protease sensitive GVGC can comprise Serratia gyp genes as Serratia GVs can express functional GV proteins in E. coli, as would be understood by a skilled person (see [35] [36]).

[0240] In some embodiments, the protease sensitive GVGC is gvpA, gvpC, gvpN, gvpJ, gvpK, gvpF, gvpG, gvpV, gvpW from Anabaena flos-aquae, in which the gvpC has been engineered to be protease sensitive.

[0241] In some embodiments, the protease sensitive GVGC is a hybrid gas vesicle gene cluster comprising gvpR, gvpN, gvpF, gvpG, gvpL, gvpS, gvpK, gvpJ, gvpT and gvpU from B. megaterium and gvpA and gvpC gene from Anabaena flos-aquae in which the gvpC has been engineered to be protease sensitive.

[0242] In some embodiments, the protease sensitive GVGC is a hybrid gas vesicle gene cluster comprising -gvpA, and gvpC from Anabaena flos-aquae, and gvpN, gvpF, gvpG, gvpL, gvpS, gvpK, gvpJ, and gvpU from B. megaterium in which the gvpC has been engineered to be protease sensitive.

[0243] In some embodiments, the protease sensitive GVGC is a hybrid gas vesicle gene cluster comprising—gvpA, gvpC and gvpN from Anabaena flos-aquae, gvpF, gvpG, gvpL, gvpS, gvpK, gvpJ, and gvpU from B. megaterium in which the gvpC has been engineered to be protease sensitive.

[0244] In embodiments herein described protease sensitive GvpC and/or GVs and related GVGC can be expressed in a host cell as will be understood by a skilled person.

[0245] The term “cell” as described herein indicates basic structural, functional, and biological unit of all known organisms. A cell consists of cytoplasm enclosed within a membrane, which contains biomolecules such as proteins and nucleic acids. Cells are two types: prokaryotic and eukaryotic.

[0246] The term “prokaryotic cell” used herein refers to a microbial species which contains no nucleus or other organelles in the cell, which includes but is not limited to Bacteria and Archaea.

[0247] The term “bacteria” as used herein refers to several prokaryotic microbial species which include but are not limited to Gram-positive bacteria, Proteobacteria, Cyanobacteria, Spirochetes and related species, Planctomyces, Bacteroides, Flavobacteria, Chlamydia, Green sulfur bacteria, Green non-sulfur bacteria including anaerobic phototrophs, Radioresistant micrococci and related species, Thermotoga and Thermosipho thermophiles. More specifically, the wording “Gram positive bacteria” refers to cocci, nonsporulating rods and sporulating rods, such as, for example, Actinomyces, Bacillus, Clostridium, Corynebacterium, Erysipelothrix, Lactobacillus, Listeria, Mycobacterium, Myxococcus, Nocardia, Staphylococcus, Streptococcus and Streptomyces. The term “Proteobacteria” refers to purple photosynthetic and non-photosynthetic gram-negative bacteria, including cocci, nonenteric rods and enteric rods, such as, for example, Neisseria, Spirillum, Pasteurella, Brucella, Yersinia, Francisella, Haemophilus, Bordetella, Escherichia, Salmonella, Shigella, Klebsiella, Proteus, Pseudomonas, Bacteroides, Acetobacter, Aerobacter, Agrobacterium, Azotobacter, Spirilla, Serratia, Vibrio, Rhizobium, Chlamydia, Rickettsia, Treponema and Fusobacterium. Cyanobacteria, e.g., oxygenic phototrophs.

[0248] The term “Archaea” as used herein refers to prokaryotic microbial species of the division Mendosicutes, such as Crenarchaeota and Euryarchaeota, and include but is not limited to methanogens (prokaryotes that produce methane); extreme halophiles (prokaryotes that live at very high concentrations of salt (NaCl); and extreme (hyper) thermophiles (prokaryotes that live at very high temperatures).

[0249] In some embodiments the prokaryotic host is a bacteria and in particular a Gram Negative Bacteria. As understood by those skilled in the art, Gram-negative bacteria are a group of bacteria that do not retain the crystal violet stain used in the Gram staining method of bacterial differentiation. They are characterized by their cell envelopes, which are composed of a thin peptidoglycan cell wall sandwiched between an inner cytoplasmic cell membrane and a bacterial outer membrane.

[0250] Exemplary Gram-negative bacteria that can be genetically engineered with GVGC genetic circuits described herein configured to allow heterologous expression of GVs comprise E. coli, Nissle 1997, Salmonella, and others identifiable by those skilled in the art.

[0251] The term “eukaryotic cell” refers to cells that contain a nucleus and organelles and are enclosed by a plasma membrane as will be understood by a person skilled in the art. Organisms that have eukaryotic cells include protozoa, fungi, plants, and animals.

[0252] The term “mammalian cell” are a type of eukaryotic cells that refer to cells from a mammal tissue comprising cell within a mammal host and cell isolated from and expanded in culture for use as therapeutic and research tools. Exemplary mammalian cells that can express GVES of the disclosure are primary cells (cells that are directly harvested from an animal and genetically engineered with GVs. Exemplary mammalian cell culture that can be genetically engineered with GV constructs described herein configured to allow expression of GVs comprise HEK 293T, CHO-K1 cells, HEK293, CHO-K1, N2A cells, HeLa, Jurkat, NIH3T3, and other identifiable by those skilled in the art.

[0253] In particular, in embodiments herein described, a protease sensitive GvpC and/or a GVGC herein described can be expressed in a host cell through gene expression casssettes of a protease sensitive Gas Vesicle Expression System (GVES) wherein in the gene expressions cassettes the GvpC protein are comprised under control of a promoter and additional regulatory regions in a configuration allowing expression in the host cell.

[0254] The term “regulatory sequence” or “regulatory regions” as described herein indicate a segment of a nucleic acid molecule which is capable of increasing or decreasing transcription or translation of a gene within an organism either in vitro or in vivo. In particular, coding regions of the GV genes herein described comprise one or more protein coding regions which when transcribed and translated produce a polypeptide. Regulatory regions of a gene herein described comprise promoters, transcription factor binding sites, operators, activator binding sites, repressor binding sites, enhancers, protein-protein binding domains, RNA binding domains, DNA binding domains, silencers, insulators and additional regulatory regions that can alter gene expression in response to developmental and/or external stimuli as will be recognized by a person skilled in the art.

[0255] The term “operative connection” as used herein indicate an arrangement of elements in a combination enabling production of an appropriate effect. With respect to genes and regulatory sequences an operative connection indicates a configuration of the genes with respect to the regulatory sequence allowing the regulatory sequences to directly or indirectly increase or decrease transcription or translation of the genes.

[0256] Regulatory sequences used in gene expression cassettes herein described identified herein also as mammalian regulatory regions are configured to operate in a mammalian cell.

[0257] Exemplary regulatory regions capable of operating in mammalian cells comprise promoters, enhancers, silencers, terminators, regulators, operators, ribosome binding/entry sites, and riboswitches, among others known in the art. Regulatory regions capable of operating in a mammalian host can be selected by a skilled person following selection of the mammalian host of interest. Exemplary constitutive and inducible mammalian promoters and operators suitable for regulating expression of GVs in a mammalian host comprise and others identifiable by those skilled in the art and described herein.

[0258] Mammalian regulatory regions comprised in a gene expression cassette herein described, typically comprise a mammalian promoter, 5′UTR regions, 3′UTR regions, and a terminator as will be understood by a skilled person.

[0259] A “mammalian promoter” in the sense of the disclosure suitable for gene expression in a mammalian cell is a region of DNA that leads to initiation of transcription of a particular gene. Exemplary are typically located on a same strand and upstream on a DNA sequence (towards the 5′ region of the sense strand), adjacent to the transcription start site of the genes whose transcription they initiate. In mammalian cells organisms, promoters typically comprise the eukaryotic TATA (SEQ ID NO: 124) box. Promoters are located near the transcription start sties of genes, upstream on the DNA. Promoters can typically be about 100-1000 base pairs long. In particular promoters that can be used in gene expression cassette herein described can be a constitutive promoter or a conditional promoter.

[0260] The term “conditional promoter” refers to a promoter with activity regulatable or controlled by endogenous transcription factors or exogenous inputs such as chemical, or thermal inducers or optical induction. Examples of mammalian constitutive promoters include inducible promoters based on exogenous agents such as TET (tetracycline-response elements, TET-ON/TET-OFF), Lac, dCas-transactivator, Zinc-finger-TF, TALENs-ZF Gal4-uas, synNotch and inducible promoters based on endogenous signals TNF-alpha, cFOS and others identifiable to a skilled person.

[0261] The term “constitutive promoter” refers to an unregulated promoter that allows for continual transcription of its associated genes. Exemplary mammalian constitutive promoters that can be used for expression in mammalian cell include CMV from human cytomegalovirus, EF1a from human elongation factor 1 alpha, SV40 from the simian vacuolating virus 40, PGK1 from phosphoglycerate kinase gene, Ubc from human ubiquitin C gene, human beta actin, CAAG, Syn1 and others identifiable to those skilled in the art.

[0262] The wording “5′UTR region” refers to the region upstream from the initiation codon as will be understood by a person of ordinary skill in the art and is therefore outside the coding region of the cassette. The 5′UTR region can contain a Kozak sequence. The Kozak sequence used herein refers to a nucleic acid motif that functions as the protein translation initiation site in most eukaryotic mRNA transcripts as will be understood by a person skilled in the art. The Kozak sequence locates approximately 6 nucleotide sequence upstream of the ATG start codon. Exemplary Kozak sequence include GCCACCATG (SEQ ID NO: 125), TTCACCATG (SEQ ID NO: 126), (CCC)TTCACCATG (SEQ ID NO: 127) consensus sequence XXX[A/G]XXATG (SEQ ID NO: 128) wherein X indicates any nucleotide, and additional sequences identifiable by a skilled person.

[0263] The “3′ UTR region” refers to an untranslated region that immediately follows the translation termination codon and is therefore outside the coding region of the cassette. 3′UTR region often contains regulatory regions that post-transcriptionally influence gene expression. Regulatory regions within the 3′UTR can influence polyadenylation, translation efficiency, localization, and stability of the mRNA as will be understood by a person skilled in the art. In some embodiments, the 3′UTR contains silencer regions which are configured to bind to repressor proteins and inhibit the expression of the mRNA.

[0264] A “terminator” as used herein indicates a sequence-based element that defines the end of a transcriptional unit and initiates the process of releasing the synthesized mRNA. Exemplary mammalian terminators include polyadenylation sites. A “polyadenylation site” indicates an element target by the polyadenylation enzymes such as CPSF and typically comprises the sequence AAUAAA (SEQ ID NO: 129) on the RNA. Polyadenylation sites will result in cleavage of the construct 10-30 nucleotides downstream the site, and addition of a poly(A) tail located at the end of 3′UTR as will be understood by a person skilled in the art. In gene expression cassette the poly(A) site can include SV40 polyadenylation element, hGH poly(A) signal, and other poly(A) signal that have the canonical AAUAAA (SEQ ID NO: 129) region as will be understood by a skilled person.

[0265] In some embodiments, a gene expression cassette can include additional mammalian regulatory regions configured to increase or decrease the expression of the GV coding regions of the cassette, as will also be understood by a skilled person.

[0266] Exemplary mammalian regulatory sequences increasing transcription of the operatively linked gene comprise enhancers that can be located more distally from the transcription start site compared to promoters, and either upstream or downstream from the regulated genes, as understood by those skilled in the art. Enhancers are typically short (50-1500 bp) regions of DNA that can be bound by transcriptional activators to increase transcription of a particular gene. Typically, enhancers can be located up to 1 Mbp away from the gene, upstream or downstream from the start site. An exemplary additional mammalian regulatory regions directed to enhance the expression levels of the GV genes, include Woodchuck Hepatitis Virus Posttranscriptional Regulatory Element (WPRE) placed downstream of the genes between GV gene and the poly(A) tail. The WPRE and WPRE-like (e.g. RE of Hepatitis B virus (HPRE)) element is known to increase transgene expression from a variety of viral vectors.

[0267] Exemplary mammalian regulatory sequences decreasing transcription of the operatively linked gene comprise RNAi/miRNA/shRNA sites that can be located upstream or downstream of the GV genes to control mRNA translation or degradation. For example, by binding to specific sites within the 3′UTR, miRNAs can decrease gene expression of various mRNAs by either inhibiting translation or directly causing degradation of the transcript.

[0268] Additional mammalian regulatory sequences that can be included in a gene expression cassette include post transcriptional regulatory sequences such as riboswitches typically present in eukaryotic untranslated regions (UTRs) of encoded RNAs. These sequences are configured to switch between alternative secondary structures in the RNA depending on the concentration of key metabolites. The secondary structures then either block or reveal other regulatory sequence regions such as RNA binding proteins. A further examples of additional post transcriptional regulatory sequences regulatory sequences comprise aptazymes fusions composed of an aptamer domain and a self-cleaving ribozyme which can be used for conditional gene expression to control mRNA levels with small molecules (e.g. tetracycline).

[0269] In general, selection of promoter and other regulatory sequences to be included in expression polynucleotidic constructs comprised in GVES of the present disclosure can be performed by one or more of the following: detecting functionality of a promoter and/or additional regulatory sequence in the host cells, selecting promoters and/or additional regulatory sequences known to be functional in the host cells; detecting the strength of the promoters and/or additional regulatory sequences in connection with protein production and/or selecting promoter and/or additional regulatory sequences of known strength; and selecting inducible promoters and/or additional regulatory sequence to control GV expression.

[0270] Mammalian regulatory sequences can be provided in any configuration which is directed to provide a desired expression of the GV protein in the coding regions. For example, a gene expression cassette can an end of UTR with polyA site only, or can be with WPRE and polyA site, or it can be with WPRE only. A combination of WPRE and polyA tail is expected to result in highest expression (highest copy of translated protein). Additional configuration can be identified by a skilled person.

[0271] In some embodiments herein described, the sequences of at least one gyp gene can be modified with respect to the natural occurring sequence to improve the related expression (e.g. to be codon optimized) and/or the inclusion in the GVES of the disclosure (e.g. by modification of the N- and/or C-terminal portions to allow the use of linker or other elements to be included in a cassette or construct of the disclosure).

[0272] Exemplary GVES are described in U.S. application Ser. No. 16/736,683 filed on Jan. 7, 2020 and in PCT/US2020/012572 filed on Jan. 7, 2020 published as WO/2020/146379 each incorporated herein by reference in its entirety.

[0273] Protease sensitive GvpC gene expression cassettes alone or in combination with other protease sensitive GVES component can be used to express a protease sensitive Gas Vesicles in a host cell herein described. The related method comprises introducing into the cell the protease sensitive gvpC gene expression cassette herein described configured for expression in the host cell, the introducing performed to allow expression of the protease sensitive GvpC herein described in the host cell in combination with other genes of a protease sensitive Gas Vesicle expression system (GVES) of the present disclosure under control of a promoter and additional regulatory regions allowing expression of the protease sensitive GVGC in the host cell and production of a protease sensitive gas vesicle type in the host cell.

[0274] The introducing can be performed with a vector is described comprising at least one of the protease sensitive gvpC gene expression cassette and protease sensitive Gas Vesicle expression system herein described.

[0275] Accordingly, in some embodiments, a vector comprising one or more GV genes encoding for GV proteins possibly with gene expression cassettes, wherein the vector is configured to introduce the one or more GV genes into a cell or eukaryotic cell such as a mammalian cell.

[0276] The term “vector” indicates a molecule configured to be used as a vehicle to artificially carry foreign genetic material into a cell, where it can be replicated and/or expressed. An expression vector is configured to carry and express the material in a cell under appropriate conditions. In some embodiments, a suitable vector can comprise a recombinant plasmid, a recombinant non-viral vector, or a recombinant viral vector. Vectors described herein can comprise suitable promoters, enhancers, post-transcriptional and post-translational elements for expression in mammalian that are identifiable by those skilled in the art.

[0277] Vectors suitable for transduction of prokaryotic cells, and in particular various Gram-negative bacterial cell types are known to those skilled in the art. In exemplary embodiments herein described, bacterial expression plasmids contain all the necessary components to allow cloning methods using E. coli, and comprise elements such as a bacterial origin of replication (ORI) and elements for plasmid maintenance such as antibiotic selection markers and toxin-antitoxin systems, and also optionally to allow incorporating the genes into the bacterial genome using recombinases such as Lambda Red, and others identifiable by those skilled in the art.

[0278] Exemplary vectors for bacterial transformation of E. coli and S. typhimurium with genetic molecular components comprising GV gene clusters are described herein in the Examples of U.S. application Ser. No. 15/663,635.

[0279] Vectors suitable for transduction of mammalian cells, are known to those skilled in the art. Exemplary vectors for transformation of a mammalian cell with genetic molecular components comprising GV gene clusters are described herein in the Examples of U.S. application Ser. No. 16/736,683.

[0280] Accordingly, a system to express a protease sensitive Gas Vesicles in a host cell with methods herein described can therefore comprises a protease sensitive gvpC gene expression cassette herein described, a e genetically engineered protease sensitive Gas Vesicle expression system (GVES), possibly within one or more vectors, and/or host cells for simultaneous combined or sequential use in the method to express a protease sensitive gas vesicle herein described.

[0281] In some embodiments at least one of the protease sensitive gas vesicle protein GvpC, the protease sensitive gas vesicle, the protease sensitive Gas Vesicle Gene Cluster (GVGC), the protease sensitive gvpC gene expression cassette, protease sensitive Gas Vesicle expression system, the vector and the cell described herein, can be comprised within a composition together with a suitable vehicle.

[0282] The term “vehicle” as used herein indicates any of various media acting usually as solvents, carriers, binders or diluents for the one or more genetic molecular components, vectors, or cells herein described that are comprised in the composition as an active ingredient. In particular, the composition including the one or more genetic molecular components, vectors, or cells herein described can be used in one of the methods or systems herein described.

[0283] In embodiments herein described, the protease sensitive Gas Vesicles herein described can be used together with contrast-enhanced imaging techniques to detect and report a protease sensitive biological event the location of and/or biochemical events in genetically engineered host cells in an imaging target site.

[0284] The term “contrast enhanced imaging” or “imaging”, as used herein indicates a visualization of a target site performed with the aid of a contrast agent present in the target site, wherein the contrast agent is configured to improve the visibility of structures or fluids by devices process and techniques suitable to provide a visual representation of a target site. Accordingly a contrast agent is a substance that enhances the contrast of structures or fluids within the target site, producing a higher contrast image for evaluation. In particular, as used herein, the term “contrast agent” refers to GVs expressed in prokaryotic cells comprised in the target site, the GVs comprised in GVGC genetic circuits in the prokaryotic cells when the GVGC genetic circuit operates according to a circuit design in response to a biochemical event, as described herein.

[0285] The term “target site” as used herein indicates an environment comprising one or more targets intended as a combination of structures and fluids to be contrasted, such as cells. In particular the term “target site” refers to biological environments such as cells, tissues, organs in vitro in vivo or ex vivo that contain at least one target. A target is a portion of the target site to be contrasted against the background (e.g. surrounding matter) of the target site. Accordingly, as used herein a target comprises one or more prokaryotic cells genetically engineered to comprise one or more GVGC genetic circuits as described herein within any suitable environment in vitro, in vivo or ex vivo as will be understood by a skilled person. Exemplary target sites include collections of microorganisms, including, bacteria or archaea in a solution or other medium in vitro, as well as cells grown in an in vitro culture, including, primary mammalian, cells, immortalized cell lines, tumor cells, stem cells, and the like. Additional exemplary target sites include tissues and organs in an ex vivo culture and tissue, organs, or organ systems in a subject, for example, lungs, brain, kidney, liver, heart, the central nervous system, the peripheral nervous system, the gastrointestinal system, the circulatory system, the immune system, the skeletal system, the sensory system, within a body of an individual and additional environments identifiable by a skilled person. The term “individual” or “subject” or “patient” as used herein in the context of imaging includes a single plant, fungus or animal and in particular higher plants or animals and in particular vertebrates such as mammals and more particularly human beings.

[0286] In embodiments herein described, imaging the target site and/or the host cell can be performed by applying ultrasound to obtain an ultrasound image of the target site.

[0287] The term “ultrasound imaging” or “ultrasound scanning” or “sonography” as used herein indicate imaging performed with techniques based on the application of ultrasound. Ultrasound refers to sound with frequencies higher than the audible limits of human beings, typically over 20 kHz. Ultrasound devices typically can range up to the gigahertz range of frequencies, with most medical ultrasound devices operating in the 1 to 18 MHz range. The amplitude of the waves relates to the intensity of the ultrasound, which in turn relates to the pressure created by the ultrasound waves. Applying ultrasound can be accomplished, for example, by sending strong, short electrical pulses to a piezoelectric transducer directed at the target. Ultrasound can be applied as a continuous wave, or as wave pulses as will be understood by a skilled person.

[0288] Accordingly, the wording “ultrasound imaging” as used herein refers in particular to the use of high frequency sound waves, typically broadband waves in the megahertz range, to image structures in the body. The image can be up to 3D with ultrasound. In particular, ultrasound imaging typically involves the use of a small transducer (probe) transmitting high-frequency sound waves to a target site and collecting the sounds that bounce back from the target site to provide the collected sound to a computer using sound waves to create an image of the target site. Ultrasound imaging allows detection of the function of moving structures in real-time. Ultrasound imaging works on the principle that different structures/fluids in the target site will attenuate and return sound differently depending on their composition. A contrast agent sometimes used with ultrasound imaging are microbubbles created by an agitated saline solution, which works due to the drop in density at the interface between the gas in the bubbles and the surrounding fluid, which creates a strong ultrasound reflection. Ultrasound imaging can be performed with conventional ultrasound techniques and devices displaying 2D images as well as three-dimensional (3-D) ultrasound that formats the sound wave data into 3-D images. In addition to 3D ultrasound imaging, ultrasound imaging also encompasses Doppler ultrasound imaging, which uses the Doppler Effect to measure and visualize movement, such as blood flow rates. Types of Doppler imaging includes continuous wave Doppler, where a continuous sinusoidal wave is used; pulsed wave Doppler, which uses pulsed waves transmitted at a constant repetition frequency, and color flow imaging, which uses the phase shift between pulses to determine velocity information which is given a false color (such as red=flow towards viewer and blue=flow away from viewer) superimposed on a grey-scale anatomical image. Ultrasound imaging can use linear or nonlinear propagation depending on the signal level. Harmonic and harmonic transient ultrasound response imaging can be used for increased axial resolution, as harmonic waves are generated from nonlinear distortions of the acoustic signal as the ultrasound waves insonate tissues in the body. Other ultrasound techniques and devices suitable to image a target site using ultrasound would be understood by a skilled person.

[0289] Types of ultrasound imaging of biological target sites include abdominal ultrasound, vascular ultrasound, obstetrical ultrasound, hysterosonography, pelvic ultrasound, renal ultrasound, thyroid ultrasound, testicular ultrasound, and pediatric ultrasound as well as additional ultrasound imaging as would be understood by a skilled person.

[0290] Applying ultrasound refers to sending ultrasound-range acoustic energy to a target. The sound energy produced by the piezoelectric transducer can be focused by beamforming, through transducer shape, lensing, or use of control pulses. The soundwave formed is transmitted to the body, then partially reflected or scattered by structures within a body; larger structures typically reflecting, and smaller structures typically scattering. The return sound energy reflected/scattered to the transducer vibrates the transducer and turns the return sound energy into electrical signals to be analyzed for imaging. The frequency and pressure of the input sound energy can be controlled and are selected based on the needs of the particular imaging task and, in some methods described herein, collapsing GVs. To create images, particularly 2D and 3D imaging, scanning techniques can be used where the ultrasound energy is applied in lines or slices which are composited into an image.

[0291] In some embodiments, imaging the target site can be performed by scanning an ultrasound image of the target site in a subject. In some cases, imaging the target site includes transmitting an imaging ultrasound signal from an ultrasound transmitter to the target site, and receiving a set of ultrasound data at a receiver. The visible image is formed by ultrasound signals backscattered from the target site. The ultrasound data can be analyzed using a processor, such as a processor configured to analyze the ultrasound data and produce an ultrasound image from the ultrasound data. In certain embodiments, the ultrasound data detected by the receiver includes an ultrasound signal, an ultrasound signal reflected by the target site of the subject.

[0292] In certain embodiments, the method includes applying a set of imaging pulses from an ultrasound transmitter to the target site, and receiving ultrasound signal at a receiver. In certain instances, the ultrasound signal detected by the receiver includes an ultrasound echo signal. Additional information of ultrasound systems and methods can be found in related publications as will be understood by a person skilled in the art.

[0293] Methods for performing ultrasound imaging are known in the art and can be employed in methods of the current disclosure. In certain aspects, an ultrasound transducer, which comprises piezoelectric elements, transmits an ultrasound imaging signal (or pulse) in the direction of the target site. Variations in the acoustic impedance (or echogenicity) along the path of the ultrasound imaging signal causes backscatter (or echo) of the imaging signal, which is received by the piezoelectric elements. The received echo signal is digitized into ultrasound data and displayed as an ultrasound image. Conventional ultrasound imaging systems comprise an array of ultrasonic transducer elements that are used to transmit an ultrasound beam, or a composite of ultrasonic imaging signals that form a scan line. The ultrasound beam is focused onto a target site by adjusting the relative phase and amplitudes of the imaging signals. The imaging signals are reflected back from the target site and received at the transducer elements. The voltages produced at the receiving transducer elements are summed so that the net signal is indicative of the ultrasound energy reflected from a single focal point in the subject. An ultrasound image is then composed of multiple image scan lines.

[0294] In embodiments herein described, imaging the target site is performed by applying or transmitting an imaging ultrasound signal from an ultrasound transmitter to the target site and receiving a set of ultrasound data at a receiver. The ultrasound data can be obtained using a standard ultrasound device, or can be obtained using an ultrasound device configured to specifically detect the contrast agent used. Obtaining the ultrasound data can include detecting the ultrasound signal with an ultrasound detector. In some embodiments, the imaging step further comprises analyzing the set of ultrasound data to produce an ultrasound image.

[0295] In certain embodiments, the ultrasound signal has a transmit frequency of at least 1 MHz, 5 MHz, 10 MHz, 20 MHz, 30 MHz, 40 MHz or 50 MHz. For example, an ultrasound data is obtained by applying to the target site an ultrasound signal at a transmit frequency from 4 to 11 MHz, or at a transmit frequency from 14 to 22 MHz.

[0296] In the embodiments herein described, the imaging ultrasound is selected to have a pressure on the protease sensitive GV based on the pressure profile of the protease sensitive GV type and the experimental design.

[0297] In particular, in embodiments, herein described, the imaging ultrasound is selected to provide the target site with a pressure below a buckling pressure of the protease sensitive GV type. In particular, ultrasound is applied to obtain detection and sensing of such nonlinear behavior, when it occurs (in presence of a protease), for example, by providing amplitude modulation (AM) ultrasound pulse sequences in order to image and differentiate the baseline nonlinear behavior of non-buckling GVs from the increased nonlinear behavior of buckling GVs.

[0298] In such amplitude modulation technique, as noted in Maresca et al 2017 [22] and in Maresca et al 2018 [23], backscattered echoes of two half-amplitude transmissions at applied pressures below the buckling threshold of the engineered GVs trigger basically linear scattering. Such echoes are digitally subtracted from echoes of a third, full-amplitude transmission at pressures above the buckling threshold of the engineered GVs and thus triggers harmonic, nonlinear scattering in case of engineered GVs. By way of example, the half-amplitude transmissions can occur with a B-mode pulse sequence, while the full-amplitude transmission can occur with a cross-amplitude modulation (x-AM) pulse sequence which uses pairs of cross-propagating plane waves to elicit highly specific nonlinear scattering from buckling GVs at the wave intersection, while subtracting the signal generated by transmitting each wave on its own (which have linear characteristics or noticeably lower nonlinear characteristics than the combined transmission of both plane waves produce at their intersection) and quantifying the resulting contrast. While it is advantageous to have the single plane wave pulses not produce any buckling, since the nonlinearity of the buckling increases with applied pressure up to an optimal point, all is required is that the harmonic responses from the individual plane waves (e.g. half pressure) be distinguishable from those of the combined intersection of the plane waves together (e.g. full pressure). Other nonlinear acoustical imaging techniques could also be used, such as cross-phase modulation imaging and harmonic imaging. Any imaging technique that allows imaging of the 2^{nd} (and/or higher) harmonics with the fundamental (first harmonic) signal subtracted out can be used to detect the buckling of the GvpC cleaved GVs (known as “differential nonlinear imaging” herein).

[0299] Reference is made in this connection to Example 1 and the related exemplary illustration of FIGS. 7H-7K. In particular, on one hand with reference to FIG. 7H, an example is shown where an engineered GVS_{TEV} sample is exposed to a TEV protease and produces a strong nonlinear acoustic response, with a maximal contrast-to-noise ratio (CNR) enhancement of about 7 dB (14. 5−6.1) at an applied acoustic pressure of about 438 kPa. On the other hand, with reference to FIG. 7K, substantially less nonlinear contrast is observed. As expected, both samples produce similar linear scattering. As also shown in FIG. 7H, consistent with the pressure-dependent mechanics of the GV shell, the differential nonlinear acoustic response of the engineered GVS_{TEV} samples becomes evident at pressures above about 295 kPa, and keeps increasing until about 556 kPa, at which point the GVs begin to collapse.

[0300] Therefore, a method to detect the presence of a protease is realized by the use of protease sensitive GVs as described herein and nonlinear acoustic imaging techniques. An example method is shown in FIG. 25.

[0301] For a given protease to be detected (either to determine its presence at a target area itself, or to detect if a certain biological event occurred that involves the action of protease) a GV is engineered (8001) to have a GvpC that would be compromised (e.g. cleaved) in the presence of that protease. In some embodiments, the engineered GvpC could also be degraded or chewed up by the protease (as for example ClpXP).

[0302] A buckling threshold and collapse threshold are determined (8002) for the GV with cleaved GvpC (exposed to protease). The collapse threshold is determined experimentally by known methods (see e.g. US 2018/0028693 “Gas-Filled Structures and Related Compositions, Methods and Systems to Image a Target Site”, incorporated by reference herein in its entirety). The buckling threshold is determined by the minimal acoustic pressure below the collapse threshold for the protease sensitive GVs to show detectable nonlinear signals, which is experimentally characterized by imaging the protease sensitive GVs under sequentially increasing acoustic pressure. See, for example, Figure. 26. The GVs are defined non-buckling if no nonlinear signals can be detected even when the collapse threshold is reached. By performing ultrasound imaging under sequentially increasing acoustic pressure, the optimum imaging pressure for the protease sensor is identified—at which there is maximum buckling of the protease sensitive GVs, giving rise to the highest nonlinear signal without collapsing the GVs. This is known herein as the “optimum buckling pressure”.

[0303] The GVs are delivered (8003) to the site, either by expressing the GVs outside the site and transporting the GVs to the site, or by having the GVs expressed at the site by a host cell.

[0304] The target site is then imaged (8004) using a differential nonlinear imaging technique, such as x-AM, such that the low amplitude (each plane wave transmitted individually) imaging (8010) is, for example, at a pressure below the buckling threshold (or, at least, at a pressure significantly below the high amplitude imaging, e.g. half) and the nonlinear high amplitude (both plane waves transmitted together) imaging (8011) is performed at a pressure above the buckling threshold. The differential image (8015) reveals the presence of the GVs that have had their GvpC weakened by the presence of the protease. Since the contrast-to-noise-ration (CNR) depend on many variables, e.g. transducers, surrounding media, electronic interference, the nonlinear signal is defined to be present when the x-AM CNR is higher than the x-AM CNR acquired with post-collapse GVs or GV-expressing cell samples, imaged under the same condition (e.g. GV/cell concentration, imaging acoustic pressure).

[0305] In some embodiments, the dynamic range of the nonlinear signal is further tuned with further manipulations of GvpC, e.g. linkers connecting the tag and GvpC, positioning of the cleavage sites, and the number of repeats in the repeating region.

[0306] The method of differential imaging based the nonlinear characteristics induced by buckling can be combined with imaging based on the GV bubble cavitation.

[0307] The buckling pressure of a given GvpC cleaved GV type can be determined by testing. FIG. 26 shows an example of how to test a GV for its buckling pressure. First, some test GVs are procured/engineered (8101) for the testing for a given GV type. These GVs are then administered (8102) to an in vitro or in vivo test site. The GvpCs of these GVs are cleaved/degraded (8103) by exposure to the correct protease, either before or after administration to the test site. The test site does not have to be the same as the target site the GVs will be eventually used for, but more accurate results may be produced if the background scattering of the test site is close to that of the target site (same nonlinear effects). Differential imaging (e.g. xAM) is performed (8105) at a low pressure. This could be the lowest pressure setting of the imaging device, or it can be an arbitrary low value well below the collapse threshold of the GVs. A determination of if the imaging steps should stop is made, for example by seeing if the GVs have collapsed from the pressure (8110). If testing should continue, the pressure (or voltage) is incrementally increased and the imaging is performed again (8115). The check (8110) and increased pressure imaging (8115) repeats until the imaging is determined to stop, then the data from all the imaging is used to get a profile (8120) of the differential imaging nonlinear response, such as shown in the examples herein. This profile shows when the nonlinear buckling effects begin to be noticeable compared the more linear low amplitude signal effects (“buckling starts”), when the effects are at a maximum (“optimal buckling pressure”), and when it ends (“collapse pressure”). A buckling pressure for the given GV type can be selected (8120) anywhere in the range from when buckling starts to the collapse pressure, including at the optimal buckling pressure. In some embodiments, information from a profile taken from the GV type without exposure to protease (uncleaved GvpC) is used to determine the characteristics of the buckling GVs by comparing at what pressure point (buckling starts value) the cleaved GvpC GVs show increased (nonlinear) echo compared to the noncleaved GvpC GVs.

[0308] Accordingly, protease sensitive GV herein described can be used to detect proteases and/or protease associated biological event in target sites and/or in a cell within a target site.

[0309] The term “biological event” or “biochemical event” as used herein refers to an activating, inhibiting, binding or converting reaction between two or more molecule in a biological environment inside or outside a cell. A “protease associated” biological event as used herein indicates a biological event involving a protease in the sense of the disclosure. For example, u-calpain activated by calcium influx cleaves the signaling proteins (e.g. RhoA) during the induction of long-term potentiation [//www.jneurosci.org/content/35/5/2269]. Another example is activated matrix metalloproteinases (MMPs) cleaving proteins in the extracellular microenvironment of cancerous cells, mediating tumor progression [//www.ncbi.nlm.nih.gov/pmc/articles/PMC2862057/].

[0310] Non-protease sensitive GvpC can be expressed under genetic circuits of interest, along with the protease sensitive GV inside the cells, where the non-protease sensitive GvpC would be expressed and replace the protease-sensitive GvpC upon induction of the genetic circuits that tune down the nonlinear signal and inactivate the protease-dependent response of the GV.

[0311] In some embodiments, the protease sensitive GV can be used as a conditional collapse protease detector. See e.g. FIG. 9D. The ClpXP exposed GV has a collapse threshold of around 223 kPa, whereas the inhibitor exposed GV (no ClpXP) has a collapse threshold of around 476 kPa. Knowing this, an ultrasound imaging at a point between the two thresholds (e.g. 300 kPa) contrasted by a following image above the 476 kPa would show if the GVs were exposed to the protease: if the first image shows collapse, then there was protease; if only the second image shows collapse, then there was no protease; and if neither image shows collapse, then the GV was not present.

[0312] In some embodiments, the protease sensitive GV can be used as a conditional cavitation nucleus. Only upon activity of specific protease and resulting decreased collapse threshold, the protease sensitive GV can be collapsed under a certain acoustic pressure and function as a cavitation nucleus, while with no such protease activity the collapse threshold would be higher than the applied acoustic pressure and the GV would not function as a cavitation nucleus efficiently. This is similar to the conditional collapse protease detector in that it depends on the GV showing different shell mechanics under cleaved vs. non-cleaved GvpC.

[0313] Accordingly, in methods herein described, administration of one or more engineered protease sensitive GV type and/or protease sensitive GV cell to a target site to be imaged, can be performed in any way suitable to deliver the one or more engineered protease sensitive GV type and/or protease sensitive GV cell to the target site to be imaged.

[0314] In some embodiments, in which the target site is the body of an individual or a part thereof, the one or more engineered protease sensitive GV type and/or protease sensitive GV cell can be administered to the target site locally or systemically.

[0315] The wording “local administration” or “topic administration” as used herein indicates any route of administration by which the one or more genetically engineered one or more engineered protease sensitive GV type and/or protease sensitive GV cell are brought in contact with the body of the individual, so that the resulting location of the one or more engineered protease sensitive GV type and/or protease sensitive GV cell in the body is topic (limited to a specific tissue, organ or other body part where the imaging is desired). Exemplary local administration routes include injection into a particular tissue by a needle, gavage into the gastrointestinal tract, and spreading a solution containing the one or more engineered protease sensitive GV type and/or protease sensitive GV cell on a skin surface.

[0316] The wording “systemic administration” as used herein indicates any route of administration by which the one or more engineered protease sensitive GV type and/or protease sensitive GV cell are brought in contact with the body of the individual, so that the resulting location of the one or more engineered protease sensitive GV type and/or protease sensitive GV cell in the body is systemic (not limited to a specific tissue, organ or other body part where the imaging is desired). Systemic administration includes enteral and parenteral administration. Enteral administration is a systemic route of administration where the substance is given via the digestive tract, and comprise oral administration, administration by gastric feeding tube, administration by duodenal feeding tube, gastrostomy, enteral nutrition, and rectal administration. Parenteral administration is a systemic route of administration where the substance is given by route other than the digestive tract and includes but is not limited to intravenous administration, intra-arterial administration, intramuscular administration, subcutaneous administration, intradermal, administration, intraperitoneal administration, and intravesical infusion.

[0317] Accordingly, in some embodiments of methods herein described, administering one or more engineered protease sensitive GV type and/or protease sensitive GV cell can be performed topically or systemically by intradermal, intramuscular, intraperitoneal, intravenous, subcutaneous, intranasal, intracerebroventricular, rectal, vaginal, and oral routes. In particular, the one or more genetically engineered bacterial cell types comprising a GVR genetic circuit can be administered by infusion or bolus injection, and can optionally be administered together with other biologically active agents. In some embodiments of methods herein described, administering one or more engineered protease sensitive GV type and/or protease sensitive GV cell can be performed by injecting one or more engineered protease sensitive GV type and/or protease sensitive GV cell such as in a body cavity or lumen.

[0318] As mentioned above, protease sensitive gas vesicle protein GvpC and related Gas Vesicle, Gas Vesicle Gene Cluster (GVGC), gene cassettes expression systems, vectors, cells, and compositions, herein described can be provided as a part of systems to perform any of the above mentioned methods. The systems can be provided in the form of kits of parts. In a kit of parts, one or more protease sensitive gas vesicle protein GvpC and related Gas Vesicle, Gas Vesicle Gene Cluster (GVGC), gene cassettes expression systems, vectors, cells, compositions, and other reagents to perform the methods herein described are comprised in the kit independently. The protease sensitive gas vesicle protein GvpC and related Gas Vesicle, Gas Vesicle Gene Cluster (GVGC), gene cassettes expression systems, vectors, and cells, can be included in one or more compositions together with a suitable vehicle.

[0319] In embodiments herein described, the components of the kit can be provided, with suitable instructions and other necessary reagents, in order to perform the methods here disclosed. The kit will normally contain the compositions in separate containers. Instructions, for example written or audio instructions, on paper or electronic support such as tapes, CD-ROMs, flash drives, or by indication of a Uniform Resource Locator (URL), which contains a pdf copy of the instructions for carrying out the assay, will usually be included in the kit. The kit can also contain, depending on the particular method used, other packaged reagents and materials (i.e. wash buffers and the like).

[0320] Further details concerning protease sensitive gas vesicle protein GvpC and related Gas Vesicle, Gas Vesicle Gene Cluster (GVGC), gene cassettes expression systems, vectors, cells, and compositions, herein described and related methods and systems of the present disclosure will become more apparent hereinafter from the following detailed disclosure of examples by way of illustration only with reference to an experimental section.

### Examples

[0321] The protease sensitive gas vesicle protein GvpC and related Gas Vesicle, Gas Vesicle Gene Cluster (GVGC), gene cassettes expression systems, vectors, cells of the disclosure and related methods, and systems herein described are further illustrated in the following examples, which are provided by way of illustration and are not intended to be limiting.

[0322] The following materials and methods were used.

### Design and Cloning of Genetic Constructs

[0323] All gene sequences were codon optimized for E. Coli expression and inserted into their plasmid backbones via Gibson Assembly or KLD Mutagenesis using enzymes from New England Biolabs and custom primers from Integrated DNA Technologies. The protease recognition sequences for TEV protease and μ-calpain, flanked by flexible linkers, were introduced by substitution-insertion into the second repeat of the wild-type Ana GvpC sequence in a pET28a expression vector (Novagen) driven by a T7 promoter and lac operator. The ssrA degradation tag for the ClpXP bacterial proteasome was appended to the C-terminus of Ana GvpC using a short flexible linker. The acoustic sensor gene for intracellular protease sensing of ClpXP was constructed by modifying of the acoustic reporter gene cluster ARG1[10], by addition of the ssrA degradation tag to the C-terminal of GvpC using a linker sequence. For expression in E. coli Nissle 1917 cells, the pET28a T7 promoter was replaced by the T5 promoter. For inducible expression of ClpX and ClpP, the genes encoding those two proteins were cloned from the E. coli Nissle 1917 genome into a modified pTARA backbone under a pBAD promoter and araBAD operon. For dynamic regulation of intracellular sensing, the wild-type GvpC sequence was cloned into a modified pTARA backbone under a pTet promoter and tetracycline operator. The complete list and features of plasmids used in this study is given in Table 13.

TABLE 13
List and features of genetic constructs used in this study

| Description of | Plasmid | Transcriptional | Output gene | Insertions/Tags | |
|---|---|---|---|---|---|
| genetic construct | Backbone | regulators | product(s) | (including linkers) | Resistance |
| WT Ana GvpC | pET28a | pT7, LacO | WT C-His | SLE-His6 at C-terminus | Kanamycin |
| used as control | | | Ana GvpC | | |
| for TEV/calpain | | | | | |
| sensor | | | | | |
| WT Ana GvpC | pET28a | pT7, LacO | WT N-His- | G-His6-SG at N-terminus | Kanamycin |
| used as control | | | Ana-GvpC | | |
| for ClpXP sensor | | | | | |
| Ana GvpC with | pET26b | pT7, LacO | C-His Ana | SLE-His6 at C-terminus, | Kanamycin |
| TEV cleavage | | | GvpC with | GSGSGSG-ENLYFQG- | |
| site | | | TEV | SGSGSG in GvpC repeat 2 | |
| | | | cleavage | | |
| | | | site | | |
| Ana GvpC with | pET28a | pT7, LacO | C-His Ana | SLE-His6 at C-terminus, | Kanamycin |
| calpain cleavage | | | GvpC with | GSGSG-QQEVYGMMPRD- | |
| site | | | calpain | GSGSG in GvpC repeat 2 | |
| | | | cleavage | | |
| | | | site | | |
| Ana GvpC with | pET28a | pT7, LacO | N-His Ana | G-His6-SG at N-terminus, | Kanamycin |
| ssrA | | | GvpC with | SG-AANDENYALAA at C- | |
| degradation tag | | | ssrA | terminus | |
| | | | degradation | | |
| | | | tag | | |
| ClpP plasmid for | pBEST | OR2-OR1-Pr | ClpP | | Ampicillin |
| use in the cell- | | | | | |
| free TX-TL | | | | | |
| system | | | | | |
| Original | pET28a | pT5, LacO | Ana GvpA, | | Kanamycin |
| acoustic | | | WT Ana | | |
| reporter gene | | | GvpC, Mega | | |
| construct | | | GvpR-U | | |
| (ARG_{WT}) | | | | | |
| Acoustic sensor | pET28a | pT5, LacO | Ana GvpA, | SG-AANDENYALAA at C- | Kanamycin |
| gene for ClpXP | | | dGvpC, | terminus | |
| (ASG_{ClpXP}) | | | Mega GvpR-U | | |
| Frt-flanked cat | pANTSγ | | CmR | | Ampicillin |
| cassette for | | | | | |
| recombineering | | | | | |
| (pKD3) | | | | | |
| Plasmid that | pBAD18 | pBAD, araBAD | Gam, Beta, | | Ampicillin |
| carries the | | operon | Exo | | |
| Lambda Red | | | | | |
| recombineering | | | | | |
| system | | | | | |
| (pKD46) | | | | | |
| Flippase to | pBAD18 | pE | FLP | | Ampicillin |
| remove the | | | | | |
| integration | | | | | |
| module in | | | | | |
| reombineering | | | | | |
| ClpX ClpP | pTARA | pBAD, araBAD | ClpX, ClpP | | Chloramphenicol |
| expression | (modified | operon | | | |
| under araBAD | by deletion | | | | |
| promoter | of pTet) | | | | |
| WT Ana GvpC | pTARA | pTet, TetO | WT Ana | | Chloramphenicol |
| under Tet | (modified | | GvpC | | |
| promoter | by deletion | | | | |
| | of pAra) | | | | |

[0324] The plasmids are available on Addgene. Plasmid constructs were cloned using NEB Turbo E. Coli (New England Biolabs) and sequence-validated.

Construction of clpX⁻ clpP⁻ Strain of E. coli Nissle 1917 (ΔClpXP)

[0325] The knockout of clpX and clpP in E. coli Nissle (ECN) was accomplished by Lamda Red recombineering using a published protocol[37]. A Frt-flanked CmR gene was recombined into ECN genome to replace the clpX and clpP genes, and the integrated CmR gene was then removed by the FLP flippase from pE-FLP⁵² to yield the ΔClpXP strain. Recombineering plasmids pKD3[37], pE-FLP[38] were obtained from Addgene, and pKD46[37] was obtained from the Coli Genetic Stock Center.

### GV Expression, Purification and Quantification

[0326] For in vitro assays, GVs were harvested and purified from confluent Ana cultures using previously published protocols[31, 32]. Briefly, Ana cells were grown in Gorham's media supplemented with BG-11 solution (Sigma) and 10 mM sodium bicarbonate at 25° C., 1% CO₂ and 100 rpm shaking, under a 14 h light and 10 h dark cycle. Confluent cultures were transferred to sterile separating funnels and left undisturbed for 2-3 days to allow buoyant Ana cells expressing GVs to float to the top and for their subnatant to be drained. Hypertonic lysis with 10% Solulyse (Genlantis) and 500 mM sorbitol was used to release and harvest the Ana GVs. Purified GVs were obtained through 3-4 rounds of centrifugally assisted floatation, with removal of the subnatant and resuspension in phosphate buffered saline (PBS, Corning) after each round.

[0327] For expression of acoustic reporter/sensor genes (ARG/ASG) in bacteria, wild-type E. Coli Nissle 1917 cells (Ardeypharm GmbH) were made electrocompetent and transformed with the genetic constructs. After electroporation, cells were rescued in SOC media supplemented with 2% glucose for 1 h at 37° C. Transformed cells were grown for 12-16 hours at 37° C. in 5 mL of LB medium supplemented with 50 μg/mL kanamycin and 2% glucose. Large-scale cultures for expression were prepared by a 1:100 dilution of the starter culture in LB medium containing 50 μg/mL kanamycin and 0.2% glucose. Cells were grown at 37° C. to an OD600 nm of 0.2-0.3, then induced with 3 μM Isopropyl β-D-1-thiogalactopyranoside (IPTG) and allowed to grow for 22 hrs at 30° C. Buoyant E. coli Nissle cells expressing GVs were isolated from the rest of the culture by centrifugally assisted floatation in 50 mL conical tubes at 300 g for 3-4 hrs, with a liquid column height less than 10 cm to prevent GV collapse by hydrostatic pressure.

[0328] The concentration of Ana GVs was determined by measurement of their optical density (OD) at 500 nm (OD₅₀₀) using a Nanodrop spectrophotometer (Thermo Fisher Scientific), using the resuspension buffer or collapsed GVs as the blank. As established in previous work[32], the concentration of GVs at OD₅₀₀=1 is approximately 114 pM and the gas fraction is 0.0417%. The OD of buoyant cells expressing GVs were quantified at 600 nm using the Nanodrop.

### Bacterial Expression and Purification of GvpC Variants

[0329] For expression of Ana GvpC variants, plasmids were transformed into chemically competent BL21(DE3) cells (Invitrogen) and grown overnight for 14-16 h at 37° C. in 5 mL starter cultures in LB medium with 50 μg/mL kanamycin. Starter cultures were diluted 1:250 in Terrific Broth (Sigma) and allowed to grow at 37° C. (250 rpm shaking) to reach an OD₆₀₀ₙₘ of 0.4-0.7. Protein expression was induced by addition of 1 mM IPTG, and the cultures were transferred to 30° C. Cells were harvested by centrifugation at 5500 g after 6-8 hours. For the GvpC-ssrA variant, expression was carried out at 25° C. for 8 hours to reduce the effect of protease degradation and obtain sufficient protein yield.

[0330] GvpC was purified from inclusion bodies by lysing the cells at room temperature using Solulyse (Genlantis), supplemented with lysozyme (400 μg/mL) and DNAseI (10 μg/mL). Inclusion body pellets were isolated by centrifugation at 27,000 g for 15 mins and then resuspended in a solubilization buffer comprising 20 mM Tris-HCl buffer with 500 mM NaCl and 6 M urea (pH: 8.0), before incubation with Ni-NTA resin (Qiagen) for 2 h at 4° C. The wash and elution buffers were of the same composition as the solubilization buffer, but with 20 mM and 250 mM imidazole respectively. The concentration of the purified protein was assayed using the Bradford Reagent (Sigma). Purified GvpC variants were verified to be >95% pure by SDS-PAGE analysis.

### Preparation of Gas Vesicles for In Vitro Protease Assays

[0331] Engineered GVs having protease-sensitive or wild-type GvpC were prepared using urea stripping and GvpC re-addition[31, 32]. Briefly, Ana GVs were stripped of their native outer layer of GvpC by treatment with 6M urea solution buffered with 100 mM Tris-HCl (pH:8-8.5). Two rounds of centrifugally assisted floatation with removal of the subnatant liquid after each round were performed to ensure complete removal of native GvpC. Recombinant Ana GvpC variants purified from inclusion bodies were then added to the stripped Ana GVs in 6 M urea a 2-3× molar excess concentration determined after accounting for 1:25 binding ratio of GvpC: GvpA. For a twofold stoichiometric excess of GvpC relative to binding sites on an average Ana GV, the quantity of recombinant GvpC (in nmol) to be added to stripped GVs was calculated according to the formula: 2*OD*198 nM*volume of GVs (in liters). The mixture of stripped GVs (OD₅₀₀ₙₘ=1-2) and recombinant GvpC in 6 M urea buffer was loaded into dialysis pouches made of regenerated cellulose membrane with a 6-8 kDa M.W. cutoff (Spectrum Labs). The GvpC was allowed to slowly refold onto the surface of the stripped GVs by dialysis in 4 L PBS for at least 12 h at 4° C. Dialyzed GV samples were subjected to two or more rounds of centrifugally assisted floatation at 300 g for 3-4 h to remove any excess unbound GvpC. Engineered GVs were resuspended in PBS after subnatant removal and quantified using pressure-sensitive OD measurements at 500 nm using a Nanodrop.

### Pressurized Absorbance Spectroscopy

[0332] Purified, engineered Ana GVs were diluted in experimental buffers to an OD₅₀₀ₙₘ ˜0.2-0.4, and 400 μL of the diluted sample was loaded into a flow-through quartz cuvette with a pathlength of 1 cm (Hellma Analytics). Buoyant E. coli Nissle cells expressing GVs were diluted to an OD₆₀₀ₙₘ of ˜1 in PBS for measurements. A 1.5 MPa nitrogen gas source was used to apply hydrostatic pressure in the cuvette through a single valve pressure controller (PC series, Alicat Scientific), while a microspectrometer (STS-VIS, Ocean Optics) measured the OD of the sample at 500 nm (for Ana GVs) or 600 nm (for Nissle cells). The hydrostatic pressure was increased from 0 to 1 MPa in 20 kPa increments with a 7 second equilibration period at each pressure before OD measurement. Each set of measurements was normalized by scaling to the Min-Max measurement value, and the data was fitted using the Boltzmann sigmoid function f(p)=(1+e^{(P-P}^{_{c}}^{)/ΔP})⁻¹, with the midpoint of normalized OD change (P_{cc}) and the 95% confidence intervals, rounded to the nearest integer, reported in the figures.

### TEM Sample Preparation and Imaging

[0333] Freshly diluted samples of engineered Ana GVs (OD₅₀₀ₙₘ ˜0.3) in 10 mM HEPES buffer containing 150 mM NaCl (pH 8) were used for TEM. 2 μL of the sample was added to Formvar/carbon 200 mesh grids (Ted Pella) that were rendered hydrophilic by glow discharging (Emitek K100X). 2% uranyl acetate was added for negative staining. Images were acquired using the FEI Tecnai T12 LaB6 120 kV TEM equipped with a Gatan Ultrascan 2 k×2 k CCD and ‘Leginon’ automated data collection software suite.

### Dynamic Light Scattering (DLS) Measurements

[0334] Engineered Ana GVs were diluted to an OD₅₀₀ₙₘ ˜0.2 in experimental buffers. 150-200 μL of the sample was loaded into a disposable cuvette (Eppendorf UVette®) and the particle size was measured using the ZetaPALS particle sizing software (Brookhaven instruments) with an angle of 90° and refractive index of 1.33.

### Denaturing Polyacrylamide Gel Electrophoresis (SDS-PAGE)

[0335] GV samples were OD₅₀₀ₙₘ matched and mixed 1:1 with 2× Laemmli buffer (Bio-Rad), containing SDS and 2-mercaptoethanol. The samples were then boiled at 95° C. for 5 minutes and loaded into a pre-made polyacrylamide gel (Bio-Rad) immersed in 1× Tris-Glycine-SDS Buffer. 10 uL of Precision Plus Protein™ Dual Color Standards (Bio-Rad) was loaded as the ladder. Electrophoresis was performed at 120V for 55 minutes, after which the gel was washed in DI water for 15 minutes to remove excess SDS and commassie-stained for 1 hour in a rocker-shaker using the SimplyBlue SafeStain (Invitrogen). The gel was allowed to de-stain overnight in DI water before imaging using a Bio-Rad ChemiDoc™ imaging system.

### In Vitro Protease Assays

[0336] For in vitro assays with the TEV endopeptidase, recombinant TEV protease (R&D Systems, Cat. No. 4469-TP-200) was incubated (25% v/v fraction) with engineered Ana GVs resuspended in PBS (final OD₅₀₀ₙₘ in reaction mixture=5-6) at 30° C. for 14-16 h. This corresponds to a TEV concentration of 0.1-0.125 mg/mL (depending on the lot), within the range used in previous studies with this enzyme[39, 40]. Engineered GVs with wild-type GvpC and TEV protease heat-inactivated at 80° C. for 20-30 mins were used as the controls.

[0337] For in vitro assays with calpain, calpain-1 from porcine erythrocytes (Millipore Sigma, Cat. No. 208712) was incubated in a 10% v/v fraction with engineered Ana GVs in a reaction mixture containing 50 mM Tris-HCl, 50 mM NaCl, 5 mM 2-mercaptoethanol, 1 mM EDTA and 1 mM EGTA and 5 mM Ca²⁺ (pH: 7.5) This corresponds to a caplain concentration of >0.168 units per μl, with 1 unit defined by the manufacturer as sufficient to cleave 1 pmol of a control fluorogenic substrate in 1 min at 25° C. The final concentration of engineered GVs in the reaction mixture was OD₅₀₀ₙₘ ˜6 and the protease assay was carried out at 25° C. for 14-16 h. Negative controls included the same reaction mixture without calpain, without calcium, or without calpain and calcium. Engineered GVs with WT-GvpC were used as additional negative controls.

[0338] For in vitro assays with ClpXP, a reconstituted cell-free transcription-translation (TX-TL) system adapted for ClpXP degradation assays (gift of Zachary Sun and Richard Murray) was used. Briefly, cell-free extract was prepared by lysis of ExpressIQ E. coli cells (New England Biolabs), and mixed in a 44% v/v ratio with an energy source buffer, resulting in a master mix of extract and buffer comprising: 9.9 mg/mL protein, 1.5 mM each amino acid except leucine, 1.25 mM leucine, 9.5 mM Mg-glutamate, 95 mM K-glutamate, 0.33 mM DTT, 50 mM HEPES, 1.5 mM ATP and GTP, 0.9 mM CTP and UTP, 0.2 mg/mL tRNA, 0.26 mM CoA, 0.33 mM NAD, 0.75 mM cAMP, 0.068 mM folinic acid, 1 mM spermidine, 30 mM 3-PGA and 2% PEG-8000. For purified ClpX protein, a monomeric N-terminal deletion variant Flag-ClpXdeltaNLinkedHexamer-His6 (Addgene ID: 22143) was used. Post Ni-NTA purification, active fractions of ClpX hexamers with sizes above 250 kDa were isolated using a Supradex 2010/300 column, flash frozen at a concentration of 1.95 μM and stored at −80° C. in a storage buffer consisting of: 50 mM Tris-Cl (pH 7.5), 100 mM NaCl, 1 mM DTT, 1 mM EDTA and 2% DMSO. The final reaction mixture was prepared as follows: 75% v/v fraction of the master mix, 10% v/v of purified ClpX, 1 nm of the purified pBEST-ClpP plasmid and engineered Ana GVs (concentration of OD₅₀₀ₙₘ=2.5-2.7 in the reaction mixture). The mixture was made up to the final volume using ultrapure H₂O. The reaction was allowed to proceed at 30° C. for 14-16 h. As a negative control, a protease inhibitor cocktail mixture (SIGMAFAST™, Millipore Sigma) was added to the reaction mixture at 1.65× the manufacturer-recommended concentration and pre-incubated at room temperature for 30 mins.

### Dynamic Sensing of ClpXP Activity in ΔClpXP E. Coli Nissle 1917 Cells

[0339] ClpXP E. Coli Nissle 1917 cells were made electrocompetent and co-transformed with the pET expression plasmid (Lac-driven) containing the ASG for ClpXP and a modified pTARA plasmid (pBAD-driven) containing the clpX and clpP genes. Electroporated cells were rescued in SOC media supplemented with 2% glucose for 2 h at 37° C. Transformed cells were grown overnight at 37° C. in 5 mL LB medium supplemented with 50 μg/mL kanamycin, 25 μg/mL chloramphenicol and 2% glucose. Starter cultures were diluted 1:100 in LB medium with 50 μg/mL kanamycin, 25 μg/mL chloramphenicol and 0.2% glucose and allowed to grow at 37° C. to reach an OD₆₀₀ₙₘ of 0.2-0.3. ASG expression was induced with 3 μM IPTG and the bacterial culture was transferred to the 30° C. incubator with 250 rpm shaking for 30 minutes. The culture was then split into two halves of equal volume, and one half was induced with 0.5% (weight fraction) L-arabinose for expression of ClpXP. Cultures with and without L-arabinose induction were allowed to grow for an additional 22 h at 30° C. Cultures were then spun down at 300 g in a refrigerated centrifuge at 4° C. for 3-4 h in 50 mL conical tubes to isolate buoyant cells expressing GVs from the rest of the culture. The liquid column height was maintained at less than 10 cm to prevent GV collapse by hydrostatic pressure.

Dynamic Sensing of Circuit-Driven Gene Expression in E. coli Nissle 1917 Cells

[0340] Electrocompetent E. coli Nissle cells were co-transformed with the pET expression plasmid (Lac-driven) containing the ASG for ClpXP and a modified pTARA plasmid (Tet-driven) containing the WT Ana GvpC gene. Electroporated cells were rescued in SOC media supplemented with 2% glucose for 2 h at 37° C. Transformed cells were grown overnight at 37° C. in 5 mL LB medium supplemented with 50 μg/mL kanamycin, 50 μg/mL chloramphenicol and 2% glucose. Starter cultures were diluted 1:100 in LB medium with 50 μg/mL kanamycin, 50 μg/mL chloramphenicol and 0.2% glucose and allowed to grow at 37° C. to reach an OD₆₀₀ₙₘ of 0.2-0.3. ASG expression was induced with 3 μM IPTG and the bacterial culture was transferred to 30° C. incubator with 250 rpm shaking for 1.5-2 h. The culture was then split into two halves of equal volume, and one half was induced with 50 ng/mL aTc for expression of WT GvpC. Cultures with and without aTc induction were allowed to grow for an additional 20 h at 30° C. Cultures were then spun down at 300 g in a refrigerated centrifuge at 4° C. for 3-4 h in 50 mL conical tubes to isolate buoyant cells expressing GVs from the rest of the culture. The liquid column height was maintained at less than 10 cm to prevent GV collapse by hydrostatic pressure.

### In Vitro Ultrasound Imaging

[0341] Imaging phantoms were prepared by melting 1% agarose (w/v) in PBS and casting wells using a custom 3D-printed template mold containing a 2-by-2 grid of cylindrical wells with 2 mm diameter and 1 mm spacing between the outer radii in the bulk material. Ana GV samples from in vitro assays or buoyant Nissle cells expressing GVs were mixed 1:1 with 1% molten agarose solution at 42° C. and quickly loaded before solidification into the phantom wells. All samples and their controls were OD-matched using the Nanodrop prior to phantom loading, with the final concentration being OD₅₀₀ₙₘ=2.2 for Ana GVs and OD_{600 nm}=1.0-1.5 for buoyant Nissle cells. Wells not containing sample were filled with plain 1% agarose. Hydrostatic collapse at 1.4 MPa was used to determine that the contribution to light scattering from GVs inside the cells was similar for those expressing the acoustic sensor gene and its wild-type ARG counterpart. The phantom was placed in a custom holder on top of an acoustic absorber material and immersed in PBS to acoustically couple the phantom to the ultrasound imaging transducer.

[0342] Imaging was performed using a Verasonics Vantage programmable ultrasound scanning system and a L22-14v 128-element linear array Verasonics transducer, with a specified pitch of 0.1 mm, an elevation focus of 8 mm, an elevation aperture of 1.5 mm and a center frequency of 18.5 MHz with 67%−6 dB bandwidth. Linear imaging was performed using a conventional B-mode sequence with a 128-ray-lines protocol. For each ray line, a single pulse was transmitted with an aperture of 40 elements. For nonlinear image acquisition, a custom cross-amplitude modulation (x-AM) sequence detailed in an earlier study[41], with an x-AM angle (0) of 19.5° and an aperture of 65 elements, was used. Both B-mode and x-AM sequences were programmed to operate at 15.625 MHz, corresponding to ¼ the sampling rate of the Vantage system. The center of the sample wells were aligned to the set transmit focus of 5 mm. Transmitted pressure at the focus was calibrated using a Precision Acoustics fiber-optic hydrophone system. Each image was a coherent average of 50 accumulations. B-mode images were acquired at a transmit voltage of 1.6V (132 kPa), and an automated voltage ramp imaging script (programmed in MATLAB) was used to sequentially toggle between B-mode and x-AM acquisitions. The script acquired x-AM signals at each specified voltage step, immediately followed by a B-mode acquisition at 1.6V (132 kPa), before another x-AM acquisition at the next voltage step. For engineered Ana GVs subjected to in vitro protease assays, an x-AM voltage ramp sequence from 4V (230 kPa) to 10V (621 kPa) in 0.2V increments was used. For wild-type Nissle cells expressing GVs, an x-AM voltage ramp sequence from 7.5V (458 kPa) to 25V (1.6 MPa) in 0.5V increments was used. Samples were subjected to complete collapse at 25V with the B-mode sequence for 10 seconds, and the subsequent B-mode image acquired at 1.6V and x-AM image acquired at the highest voltage of the voltage ramp sequence was used as the blank for data processing. There was no significant difference between the signals acquired at specific acoustic pressures during a voltage ramp or after directly stepping to the same pressure (FIG. 18).

[0343] Due to transducer failure, a replacement Verasonics transducer (L22-14vX) with similar specifications was used in experiments with ΔClpXP cells. The transmitted pressure at the focus was calibrated in the same way as the L22-14v. B-mode images were acquired at a transmit voltage of 1.6V (309 kPa), and an x-AM voltage ramp sequence from 6V (502 kPa) to 25V (2.52 MPa) was used. The imaging protocol was otherwise unchanged.

### In Vivo Ultrasound Imaging

[0344] All in vivo experiments were performed on C57BL/6J male mice, aged 14-34 weeks, under a protocol approved by the Institutional Animal Care and Use Committee of the California Institute of Technology. No randomization or blinding were necessary in this study. Mice were anesthetized with 1-2% isoflurane, maintained at 37° C. on a heating pad, depilated over the imaged region, and enema was performed by injecting PBS to expel gas and solid contents in mice colon. For imaging of E. coli in the gastrointestinal tract, mice were placed in a supine position, with the ultrasound transducer positioned on the lower abdomen, transverse to the colon such that the transmit focus of 5 mm was close to the center of the colon lumen. Prior to imaging, two variants of buoyancy-enriched E. coli Nissle 1917 were mixed in a 1:1 ratio with 4% agarose in PBS at 42° C., for a final bacterial concentration of 1.5E9 cells ml⁻¹. An 8-gauge gavage needle was filled with the mixture of agarose and bacteria of one cell population. Before it solidified, a 14-gauge needle was placed inside the 8-gauge needle to form a hollow lumen within the gel. After the agarose-bacteria mixture solidified at room temperature for 10 min, the 14-gauge needle was removed. The hollow lumen was then filled with the agarose-bacteria of the other cell population. After it solidified, the complete cylindrical agarose gel was injected into the colon of the mouse with a PBS back-filled syringe. For the colon imaging, imaging planes were selected to avoid gas bubbles in the field of view. In all in vivo experiments, three transducers were used, including two L22-14v and one L22-14vX, due to transducer failures unrelated to this study. B-mode images were acquired at 1.9V (corresponding to 162 kPa in water) for L22-14v, and 1.6V (309 kPa in water) for L22-14vX. x-AM images were acquired at 20V (1.27 MPa in water) for L22-14v and 15V (1.56 MPa in water) for L22-14vX, with other parameters being the same as those used for in vitro imaging. B-mode anatomical imaging was performed at 7.4V using the ‘L22-14v WideBeamSC’ script provided by Verasonics.

### Image Processing and Data Analysis

[0345] All in vitro and in vivo ultrasound images were processed using MATLAB. Regions of interest (ROIs) were manually defined so as to adequately capture the signals from each sample well or region of the colon. The sample ROI dimensions (1.2 mm×1.2 mm square) were the same for all in vitro phantom experiments. The noise ROI was manually selected from the background for each pair of sample wells. For the in vivo experiments, circular ROIs were manually defined to avoid edge effects from the skin or colon wall, and the tissue ROIs were defined as the rest of the region within the same depth range of the signal ROIs. For each ROI, the mean pixel intensity was calculated, and the pressure-sensitive ultrasound intensity (ΔI=I_{intact}−I_{collapsed}) was calculated by subtracting the mean pixel intensity of the collapsed image from the mean pixel intensity of the intact image. The contrast-to-noise ratio (CNR) was calculated for each sample well by taking the mean intensity of the sample ROI over the mean intensity of the noise ROI. The x-AM by B-mode ratio at a specific voltage (or applied acoustic pressure) was calculated with the following formula:

$$\frac{Δ {I}_{x - AM} ( V )}{Δ {I}_{B \text{-} mode} ( V )}$$

where ΔI_{x-AM} (V) is the pressure-sensitive nonlinear ultrasound intensity acquired by the x-AM sequence at a certain voltage V, and ΔI_{B-mode}(V) is the pressure-sensitive linear ultrasound intensity of the B-mode acquisitions at 1.6V (132 kPa) following the x-AM acquisitions at the voltage V. All images were pseudo-colored (bone colormap for B-mode images, hot colormap for x-AM images), with the maximum and minimum levels indicated in the accompanying color bars.

### Statistical Analysis

[0346] Data is plotted as the mean±standard error of the mean (SEM). Sample size is N=3 biological replicates in all in vitro experiments unless otherwise stated. For each biological replicate, there were technical replicates to accommodate for variability in experimental procedures such as sample loading and pipetting. SEM was calculated by taking the values for the biological replicates, each of which was the mean of its technical replicates. The numbers of biological and technical replicates were chosen based on preliminary experiments such that they would be sufficient to report significant differences in mean values. Individual data for each replicate is given in FIGS. 12A-16 in the form of scatter plots. P values, for determining the statistical significance for the in vivo data, were calculated using a two-tailed paired t-test.

### Example 1: Engineering an Acoustic Sensor of TEV Endopeptidase Activity

[0347] This example describes the process of engineering an acoustic sensor of TEV endopeptidase activity.

[0348] TEV endopeptidase was selected as the first sensing target because of its well-characterized recognition sequence and widespread use in biochemistry and synthetic biology[39, 40].

[0349] To sense TEV activity, a GvpC variant containing the TEV recognition motif ENLYFQ′G (FIG. 7B) was engineered based on the hypothesis that the cleavage of GvpC into two smaller segments would cause the GV shell to become less stiff, thereby allowing it to undergo buckling and produce enhanced nonlinear ultrasound contrast. This design was implemented in vitro using GVs from Anabaena flos-aque (Ana), whose native GvpC can be removed after GV isolation and replaced with new versions expressed heterologously in Escherichia coli[31, 32]. Ana GvpC comprises five repeats of a predicted alpha-helical polypeptide (FIG. 7A), and insertions of the TEV recognition sequence were tested, with and without flexible linkers of different lengths, at several locations within this protein.

[0350] After incubating the engineered GVs with active TEV protease or a heat-inactivated “dead” control (dTEV), their hydrostatic collapse was measured using pressurized absorbance spectroscopy. This technique measures the optical density of GVs (which scatter 500 nm light when intact) under increasing hydrostatic pressure, providing a quick assessment of GV shell mechanics: GVs that collapse at lower pressures also produce more nonlinear contrast[10, 31, 32, 42]. Using this approach, we identified an engineered GV variant that showed ˜70 kPa reduction in its collapse pressure midpoint upon incubation with the active TEV protease (FIG. 7C). This GV sensor for TEV, hereafter referred to as GVS_{TEV}, has the TEV cleavage site on the second repeat of GvpC, flanked by flexible GSGSGSG linkers on both sides.

[0351] TEV cleavage of the GvpC on GVS_{TEV} is expected to produce N- and C-terminal fragments with molecular weights of approximately 9 and 14 kDa, respectively. Indeed, gel electrophoresis of GVS_{TEV} after exposure to active TEV resulted in the appearance of the two cleaved GvpC fragments and a significant reduction in the intact GvpC band (FIG. 7D). In addition, removal from solution of unbound fragments via buoyancy purification of the GVs resulted in a reduced band intensity for the N-terminal cleavage fragment, indicating its partial dissociation after cleavage (FIG. 7D). No significant changes in the GvpC band intensity were observed after incubation with dTEV. Transmission electron microscopy (TEM) images showed intact GVs with similar appearance under both conditions, confirming that protease cleavage did not affect the structure of the underlying GV shell (FIG. 7E). Dynamic light scattering (DLS) showed no significant difference in the hydrodynamic diameter of the engineered GVs after incubation with dTEV and active TEV protease, confirming that the GVs remain dispersed in solution (FIG. 7F).

[0352] After the desired mechanical and biochemical properties of GVS_{TEV} were confirmed, the GVS_{TEV} was imaged with ultrasound. Nonlinear imaging was performed in hydrogel samples containing the biosensor, using a recently developed cross-amplitude modulation (x-AM) pulse sequence. x-AM uses pairs of cross-propagating plane waves to elicit highly specific nonlinear scattering from buckling GVs at the wave intersection, while subtracting the linear signal generated by transmitting each wave on its own[41]. Linear images were acquired using a conventional B-mode sequence. As hypothesized, exposing the GVS_{TEV} samples to TEV protease produced a strong nonlinear acoustic response, with a maximal contrast-to-noise ratio (CNR) enhancement of ˜7 dB at an applied acoustic pressure of 438 kPa (FIG. 7G). Substantially less nonlinear contrast was observed in controls exposed to dTEV, while, as expected, both samples produced similar linear scattering. Consistent with the pressure-dependent mechanics of the GV shell, the differential nonlinear acoustic response of GVS_{TEV} became evident at pressures above 295 kPa, and kept increasing until 556 kPa, at which point the GVs began to collapse (FIG. 7H). As an additional control, it was found that GVs with the wild-type GvpC sequence (GV_{WT}) showed no difference in their hydrostatic collapse pressure or nonlinear acoustic contrast in response to TEV protease (FIGS. 7I-7K), and no wild-type GvpC cleavage was seen upon gel electrophoresis (FIGS. 12A-12C).

[0353] These results established GVS_{TEV} as an acoustic biosensor of the TEV protease enzyme and provided a template for developing additional sensors.

### Example 2: Engineering an Acoustic Sensor of Mammalian Calpain

[0354] This example describes the process of engineering an acoustic sensor of mammalian calpain.

[0355] After validating the basic acoustic biosensor design using the model TEV protease in Example 1, Applicant then examined its generalizability to other endopeptidases, selecting as the second target the calcium-dependent cysteine protease calpain, a mammalian enzyme with critical roles in a wide range of cell types [43-45]. The two most abundant isoforms of this protease, known as μ-calpain and m-calpain, are expressed in many tissues and involved in processes ranging from neuronal synaptic plasticity to cellular senescence[43, 44].

[0356] An acoustic biosensor of μ-calpain was designed by inserting the α-spectrin-derived recognition sequence QQEVY′GMMPRD[46] into Ana GvpC (FIG. 8A). Several versions of GvpC incorporating this cleavage sequence were screened, flanked by GSG or GSGSG linkers, at different positions within the second helical repeat. Pressurized absorbance spectroscopy performed in buffers with and without calpain and Ca²⁺ allowed us to identify a GV sensor for calpain (GVS_{calp}), showing an approximately 50 kPa decrease in hydrostatic collapse pressure in the presence of the enzyme and its ionic activator (FIG. 8B). Electrophoretic analysis confirmed cleavage and partial dissociation of the cleaved fragments from the GV surface (FIG. 8C), while TEM showed no change in GV morphology (FIG. 8D).

[0357] Ultrasound imaging of GVS_{calp} revealed a robust nonlinear acoustic response when both calpain and calcium were present (FIGS. 8E, 8G, 8I), but not in negative controls lacking either or both of these analytes. A slight clustering tendency of GVS_{calp} nanostructures, which was attenuated by incubation with activated calpain (FIGS. 13A-13D), resulted in a slightly higher B-mode signal for the negative controls. However, this did not significantly affect the maximal nonlinear sensor contrast of GVS_{calp} of approximately 7 dB (FIGS. 8E, 8G, 8I). This contrast increased steeply beyond an applied acoustic pressure of 320 kPa (FIGS. 8F, 8H, 8J). With this biosensor, ultrasound could be used to visualize the dynamic response of calpain to Ca²±, with a half-maximal response concentration of 140 μM (FIG. 8K). Additional control experiments performed on GVs with wild-type GvpC showed no proteolytic cleavage, change in GV collapse pressure or ultrasound response, after incubation with calcium-activated calpain (FIGS. 14A-14H).

[0358] These results show that acoustic biosensor designs based on GvpC cleavage can be generalized to a mammalian protease and used to sense the dynamics of a conditionally active enzyme.

### Example 3: Building an Acoustic Sensor of the Processive Protease ClpXP

[0359] This example describes the process of building an acoustic sensor of the processive protease ClpXp.

[0360] In addition to endopeptidases demonstrated in Examples 1-2, another important class of enzymes involved in cellular protein signaling and homeostasis is processive proteases, which unfold and degrade full proteins starting from their termini[47].

[0361] To determine whether GV-based biosensors could be developed for this class of enzymes, ClpXP was selected, a processive proteolytic complex from E. coli comprising the unfoldase ClpX and the peptidase ClpP[48]. ClpX recognizes and unfolds protein substrates containing specific terminal peptide sequences called degrons. The unfolded proteins are then fed into ClpP, which degrades them into small peptide fragments[48]. It was hypothesized that the addition of a degron to the C-terminus of GvpC would enable ClpXP to recognize and degrade this protein, while leaving the underlying GvpA shell intact, resulting in GVs with greater mechanical flexibility and nonlinear ultrasound contrast (FIG. 9A).

[0362] To test this hypothesis, the ssrA degron, AANDENYALAA, as appended via a short SG linker, to the C-terminus of Ana GvpC, resulting in a sensor named GVS_{ClpXP} (FIG. 9A). The performance of this biosensor was tested in vitro using a reconstituted cell-free transcription-translation system comprising E. coli extract, purified ClpX, and a ClpP plasmid. Gel electrophoresis performed after incubating GVS_{ClpXP} with this cell-free extract showed significant degradation of the engineered GvpC, compared to a negative control condition in which the extract was pre-treated with a protease inhibitor (FIG. 9B). TEM images showed intact GVs under both conditions, confirming that GvpC degradation left the underlying GV shell uncompromised (FIG. 9C). Pressurized absorbance spectroscopy indicated a substantial weakening of the GV shell upon ClpX exposure, with the hydrostatic collapse midpoint shifting by nearly 250 kPa (FIG. 9D). Ultrasound imaging revealed a 17 dB enhancement in the nonlinear contrast produced by GVS_{ClpXP} at an acoustic pressure of 477 kPa, in response to ClpXP activity (FIG. 9E-9F). Control GVs containing wild type GvpC showed no sensitivity to ClpXP (FIGS. 9G, 9H, 9I; FIGS. 15A-15E).

[0363] These results establish the ability of GV-based acoustic biosensors to visualize the activity of a processive protease as turn-on sensors.

### Example 4: Constructing Intracellular Acoustic Sensor Genes

[0364] This example demonstrates the ability of the acoustic biosensors to respond to enzymatic activity inside living cells.

[0365] After demonstrating the performance of acoustic biosensors in vitro, Applicant endeavored to show that they could respond to enzymatic activity inside living cells. As the cellular host, E. coli Nissle 1917 was selected. This probiotic strain of E. coli has the capacity to colonize the mammalian gastrointestinal tract, and is widely used as a chassis for the development of microbial therapeutics[49-51], making it a valuable platform for intracellular bio sensors.

[0366] Recently, an engineered operon comprising GV-encoding genes from Anabaena flos-aquae and Bacillus megaterium was expressed in Nissle cells as acoustic reporter genes (ARGs), allowing gene expression to be imaged with linear B-mode ultrasound[10]. To develop an intracellular acoustic sensor gene targeting ClpXP (ASG_{ClpXP}), the wild type GvpC in the ARG gene cluster (ARG_{WT}) was swapped with the modified GvpC from GVS_{ClpXP} (dGvpC) (FIG. 10A), and transformed into wild-type (WT) Nissle cells, which natively express ClpXP. It was hypothesized that it would show a reduced intracellular collapse pressure and enhanced nonlinear contrast compared to ARG_{WT}. Indeed, pressurized absorbance spectroscopy on intact cells expressing ASG_{ClpXP} revealed a reduction in the hydrostatic collapse pressure midpoint of ˜160 kPa relative to cells expressing ARG_{WT} (FIG. 10B). In ultrasound imaging, live cells expressing ASG_{ClpXP} showed an enhancement in nonlinear contrast of approximately 13 dB (FIG. 10C), while linear B-mode signal was similar. The nonlinear response of ASG_{ClpXP} expressing cells was strongest beyond an acoustic pressure of 784 kPa (FIG. 10D; FIG. 16 panel a).

[0367] Next, to examine the ability of ASG_{ClpXP} to respond to intracellular enzymatic activity in a dynamic manner, a ClpXP-deficient strain of Nissle cells (ΔClpXP) was generated through genomic knock-out of the genes encoding ClpX and ClpP, and a plasmid containing these two genes under the control of an arabinose-inducible promoter was created (FIG. 4A). This allowed one to externally control the activity of the ClpXP enzyme. ΔClpXP Nissle cells were co-transformed with the inducible-ClpXP plasmid and ASG_{ClpXP}. ClpXP induction in these cells with L-arabinose resulted in an approximately 160 kPa reduction in the hydrostatic collapse pressure midpoint (FIG. 10E). Under ultrasound imaging, cells with induced ClpXP activity showed substantially stronger nonlinear contrast (+6.7 dB) compared to cells uninduced for this protease (FIG. 10F), while showing a similar B-mode signal. This enhancement in nonlinear signal was detectable with acoustic pressures above 950 kPa (FIG. 10G; FIG. 16 panel b).

[0368] These experiments demonstrated the ability of ASG_{ClpXP} to function as an intracellular acoustic sensor to monitor variable enzyme activity.

[0369] A major application of dynamic sensors in cells is to monitor the activity of natural or synthetic gene circuits[52-55]. To test if the acoustic sensors herein described could be used to track the output of a synthetic gene circuit in cells, Applicant co-transformed WT Nissle cells with ASG_{ClpXP}, and a separate wild-type GvpC gene controlled by anhydrotetracycline (aTc) (FIG. 10H). The hypothesis was that induction of this gene circuit only with IPTG would result in the production of GVs with ClpXP-degradable GvpC, resulting in nonlinear contrast, whereas the additional input of aTc would result in the co-production of non-degradable wild-type GvpC, which would take the place of any degraded engineered GvpC on the biosensor shell, leading to reduced nonlinear scattering (FIG. 10H).

[0370] Indeed, when cells were induced with just IPTG strong nonlinear contrast was observed. However, when aTc was added to the cultures after IPTG induction, this contrast was reduced by approximately 10 dB (FIGS. 10I, and 10J, FIG. 16 panel c).

[0371] These results, together with the findings in ΔClpXP cells with inducible ClpXP, show that acoustic biosensors can be used to visualize the output of synthetic gene circuits.

### Example 5: Ultrasound Imaging of Bacteria Expressing Acoustic Sensor Genes In Vivo

[0372] This example demonstrates the ability of the acoustic sensor constructs herein described to produce ultrasound contrast within a biologically relevant anatomical location in vivo.

[0373] Finally, after establishing the basic principles of acoustic biosensor engineering in vitro and demonstrating their performance in living cells, Applicant assessed the ability of the sensor constructs herein described to produce ultrasound contrast within a biologically relevant anatomical location in vivo.

[0374] In particular, approaches to imaging microbes in the mammalian GI tract[10, 56-58] are needed to support the study of their increasingly appreciated roles in health and disease[59-61] and the development of engineered probiotic agents[62, 63]. The GI tract is also an excellent target for ultrasound imaging due to its relatively deep location inside the animal, and the use of ultrasound in clinical diagnosis and animal models of GI pathology, with appropriate measures taken to minimize potential interference from air bubbles and solid matter[64, 65].

[0375] To demonstrate the ability of acoustic biosensors to produce nonlinear ultrasound contrast within the in vivo context of the mouse GI tract, WT Nissle cells expressing ASG_{ClpXP} and ARG_{WT} were first co-injected into the mouse colon (FIG. 11, panel a), distributing one cell population along the lumen wall and the other in the lumen center. In these proof-of-concept experiments, the cells are introduced into the colon in a rectally-injected agarose hydrogel to enable precise positioning and control over composition. Using nonlinear ultrasound imaging, one could clearly visualize the unique contrast generated by the protease-sensitive ASG as a bright ring of contrast lining the colon periphery (FIG. 11, panel b). When the spatial arrangement was reversed, the bright nonlinear contrast was concentrated in the middle of the lumen (FIG. 17). A comparison of ultrasound images acquired before and after acoustic collapse of the GVs, using a high-pressure pulse from the transducer, confirmed that the bright ring of nonlinear contrast was emanating from ASG_{ClpXP}-expressing cells (FIG. 11, panel b), and this result was consistent across independent experiments in 9 mice (FIG. 11, panel c).

[0376] To demonstrate in vivo imaging of enzyme activity, ΔClpXP Nissle cells expressing ASG_{ClpXP} were introduced into the mouse colon, with and without transcriptionally activating intracellular ClpXP. As above, the cells were contained in an agarose hydrogel. Cells induced to express this enzyme showed enhanced nonlinear contrast compared to cells not expressing ClpXP (FIG. 11, panel d). Acoustic collapse confirmed the acoustic biosensors as the primary source of nonlinear signal (FIG. 11, panel d). This performance was consistent across 7 mice and 2 spatial arrangements of the cells (FIG. 11, panel e).

[0377] These results demonstrate the ability of acoustic biosensors to visualize enzyme activity within the context of in vivo imaging.

[0378] Besides molecular sensing, one additional benefit of the nonlinear contrast generated by ASG_{ClpXP}-expressing cells is to make the cells easier to detect relative to background tissue compared to linear B-mode imaging. Indeed, the nonlinear contrast of WT Nissle cells expressing ASG_{ClpXP} had a significantly higher contrast-to-tissue ratio than either the nonlinear contrast of ARG_{WT}-expressing cells, or the B-mode contrast of either of these two species (FIG. 11, panel f).

### Example 6: Identification of Gyp Genes and Protein Sequences Through Alignment

[0379] Gyp genes and related protein can be identified through alignment of sequences in databases or identified through wet bench experiments with an approach and techniques identifiable by a skilled person.

[0380] Taking as gvpA/B as an example, the identification can be performed using consensus sequence: SSSLAEVLDRILDKGXVIDAWARVSLVGIEILTIEARVVIASVDTYLR (SEQ ID NO: 1) wherein X can be any amino acid. LDRILD (SEQ ID NO: 3), RILDKGXVIDAWARVS (SEQ ID NO: 4) wherein X can be any amino acid, and/or DTYLR (SEQ ID NO: 5), and/or of exemplary gvpA and gvpB protein sequences already identified, as it will be understood by a skilled person.

[0381] FIG. 19 shows an exemplary Clustal omega alignment of amino acid sequences of selected exemplary gvpA and gvpB proteins.

[0382] The gvpA and gvpB proteins shown are from the following species: Sa_A2, Serratia sp. ATCC 39006 gvpA2; Sa_A3, Serratia sp. ATCC 39006 gvpA3; Sc_A2, Streptomyces coelicolor gvpA2; Sc_A1, Streptomyces coelicolor gvpA1; Fc_A, Frankia sp. gvpA; Bm_B1, B. megaterium gvpB1; Mb_A, Methanosarcina barkeri gvpA; Hv_A, Halorubrum vacuolatum gvpA; Hm_A, Haloferax mediterranei gvpA; Hs_A1, Halobacterium sp. NRC-1 gvpA1; Hs_A2, Halobacterium sp. NRC-1 gvpA2; Bm_A, B. megaterium gvpA; Bm_B2, B. megaterium gvpB2; Af_A, A. flos-aquae gvpA; Ma_A,; Sa_A1, Serratia sp. ATCC 39006 gvpA1.

[0383] The bottom row of FIG. 19 indicated as “Consensus” shows an exemplary consensus sequence derived from alignment of the gvpA and gvpB amino acid sequences shown.

[0384] Homology-based searching (e.g., BLAST alignment) of sequences of proteins encoded in the genome of a prokaryotic organism compared to the exemplary consensus sequence shown in FIG. 19 can be used to identify gvpA and/or gvpB protein sequences in the prokaryotic organism.

### Example 7: Identification Gyp Genes and Protein Sequences Through Phylogenesis

[0385] Gyp genes and related protein can be identified based on phylogenetic relationships of sequences in databases or identified through wet bench experiments with an approach and techniques identifiable by a skilled person.

[0386] In particular, exemplary gvpA, gvpF and gvpN genes and proteins were identified phylogenetic relationships as shown below.

[0387] FIG. 20 shows exemplary phylogenetic relationships of the gvpA protein sequences from the indicated prokaryotic species [1]. Table 14 lists examples of GV protein sequences from a number of prokaryotic species.

[0388] Identification of a gvpA/B protein can be performed by comparing the sequence of an unknown protein in a prokaryotic cell with that of a known gvpA sequence from the closest phylogenetic relative of the prokaryotic species, such as those indicated in the exemplary phylogenetic tree diagram in FIG. 20. Alternatively, identification of gvpA/B can be done through protein alignment algorithms (e.g. BLAST) with the gvpA/B consensus sequence provided in this document, where the protein identity has 60% or higher to this sequence.

[0389] FIG. 21 shows exemplary phylogenetic relationships of the gvpF and gvpL protein sequences from the indicated prokaryotic species [1]. In some embodiments described herein, the identification of a gvpF protein can be performed by comparing the sequence of an unknown protein in a prokaryotic cell with that of a known gvpF sequence from the closest phylogenetic relative of the prokaryotic species, such as those indicated in the exemplary phylogenetic tree diagram in FIG. 21.

[0390] FIG. 22 shows exemplary phylogenetic relationships of the gvpN protein sequences from the indicated prokaryotic species [1]. In some embodiments described herein, the identification of a gvpN protein can be performed by comparing the sequence of an unknown protein in a prokaryotic cell with that of a known gvpN sequence from the closest phylogenetic relative of the prokaryotic species, such as those indicated in the exemplary phylogenetic tree diagram in FIG. 22.

[0391] The protein sequences provided in Table 14 can also be used with protein alignment algorithms to identify gyps. Where the using BLAST or other tools, if the top 100 based on protein identity or 100 lowest E-values are identified as “gas vesicle protein” or “gyp” or “gas vesicle structural protein”, the protein can be designated as a gas vesicle protein.

### Example 8: Identification of Gyp Genes and Proteins Through Analysis of Configuration Vesicle Gene Clusters in Prokaryotes

[0392] Identification of gyp genes and proteins can be performed also GV cluster configuration of gas vesicle gene clusters in prokaryotes which can be used to identify the specific genes forming a GV cluster in a microorganism, in combination with use of consensus sequences, alignment and/or phylogenetic analysis of GV clusters.

[0393] FIG. 23 shows diagrams illustrating the organization of exemplary gas vesicle gene clusters. Gas vesicle gene clusters from the indicated organisms are shown, with genes shown as block-shaped arrows, and genes of predicted similar function indicated in the same shade of grey. The direction of the transcription of genes within a gene cluster is indicated by the direction of the block-shaped arrows, and genes grouped together having block arrows pointed in the same direction are typically organized in the same operon. The scale bar indicates 1 kb [1].

[0394] In addition, FIG. 24 shows diagrams illustrating organization of exemplary gyp gene clusters, wherein each letter indicates a gyp gene, and an arrow beneath a group of letters indicates an operon, with the direction of the arrow indicating the direction of transcription [2].

[0395] To identify gyp genes and gyp gene cluster, the following methodology can be used

[0396] 1. Using the 60+% gvpA/B and/or 50%+gvpN consensus sequences and/or gyp sequences provided in Table 14, identify gyp genes on the genome of the prokaryote.

[0397] 2. For a gyp gene identified, test the next 10 protein coding sequences on both side of the gene to determine if it is gyp gene. Using BLAST or other tools, if the top 100 based on protein identity or 100 lowest E-values are identified as “gas vesicle protein” or “gyp” or “gas vesicle structural protein”, the protein can be designated as a gas vesicle protein.

[0398] 3. If the adjacent genes are labeled as gyp gene, continue testing the next 10 protein coding sequences on both sides of the protein, moving away from the labeled gyp genes. Use criterion 2 to continue identifying gyp genes. If the adjacent 10 genes are not marked as gyp genes continue to next part.

[0399] 4. The genes at the extreme ends will mark the edge of the gene cluster and all the genes inside are part of the gene cluster than can be tested for heterologous expression gas vesicle in bacteria/mammalian cells. In some cases, there can be one or more gene clusters encoding gyp genes, therefore all the gene clusters are tested during heterologous expression.

[0400] In particular, the above methodology can be one way to identify gyp gene clusters in an unannotated or mis-annotated genome as will be understood by a skilled person.

### Example 9: Amino Acid Sequences of Exemplary GV Proteins Including GVS and GVA Proteins

[0401] Several gyp genes and related proteins have been identified and are available in accessible databases.

[0402] In particular, Tables 14-18 show amino acid sequences of exemplary GVS (gvpA/B or gvpC) and GVA proteins from several exemplary prokaryotic species. In particular, these exemplary amino acid sequences can be used as reference amino acid sequences in some embodiments for homology-based searches for related GVS and GVA proteins.

TABLE 14
Amino acid sequences of exemplary gvpA/B, gvpF, gvpF/L, gvpG, gvpJ, gvpK, gvpL, gvpN,
gvpV, gvpW, gvpR, gvpS, gvpT, and gvpU proteins

| | | SEQ ID |
|---|---|---|
| Species, protein; | Amino acid sequence | NO.: |
| gvpA/B | | |
| Ana-family- | MAVEKTNSSSSLAEVIDRILDKGIVIDAWVRVSLVGIELLAIEARXVIASVETYLKYAE | 130 |
| consensus_gvpA | AVGLTXSAAVPAX | |
| Aphanizomenon-flos- | MAVEKTNSSSSLAEVIDRILDKGIVIDAWVRVSLVGIELLAIEARIVIASVETYLKYAE | 131 |
| aquae_gvpA | AVGLTQSAAVPA* | |
| Aphanothece- | MAVEKTNSSSSLGEVVDRILDKGVVVDLWVRVSLVGIELLAVEARVVVASVETYLK | 132 |
| halophytica_gvpA | YAEAVGLTSSAAVPAE* | |
| Anabaena-flos- | MAVEKTNSSSSLAEVIDRILDKGIVIDAWVRVSLVGIELLAIEARIVIASVETYLKYAE | 133 |
| aquae_gvpA | AVGLTQSAAVPA* | |
| Ancylobacter- | MAVEKINASSSLAEVVDRILDKGVVVDAWVRVSLVGIELLAVEARVVVAGVDTYLK | 134 |
| aquaticus_gvpA | YAEAVGLTASAQAA* | |
| Aquabacter- | MAVEKINASSSLAEVVDRILDKGVVVDAWVRVSLVGIELLAVEARVVVAGVDTYLK | 135 |
| spiritensis_gvpA | YAEAVGLTAGAQAA* | |
| Arthrospira-sp-PCC- | MAVEKVNSSSSLAEVIDRILDKGIVIDAWVRVSLVGIELLSVEARVVIASVETYLKYA | 136 |
| 8005_gvpA | EAVGLTAQAAVPSV* | |
| Calothrix-sp-strain- | MAVEKTNSSSSLAEVIDRILDKGIVVDAWVRVSLVGIELLAIEARIVIASVETYLKYAE | 137 |
| PCC-7601_gvpA | AVGLTQSAAVPA* | |
| Dactylococcopsis- | MAVEKTNSSSSLGEVVDRILDKGVVVDLWVRVSLVGIELLAVEARVVIASVETYLKY | 138 |
| salina-PCC- | AEAVGLTSSAAVPAE* | |
| 8305_gvpA1 | | |
| Dolichospermum- | MAVEKTNSSSSLAEVIDRILDKGIVIDAWVRVSLVGIELLAIEARIVIASVETYLKYAE | 139 |
| circinale- | AVGLTQSAAVPA* | |
| AWQC131C_gvpA | | |
| Dolichospermum- | MAVEKTNSSSSLAEVIDRILDKGIVIDAWVRVSLVGIELLAIEARIVIASVETYLKYAE | 140 |
| lemmermannii_gvpA | AVGLTQSAAVPA | |
| Enhydrobacter- | MAVEKMNASSSLAEVVDRILDKGIVIDAWVRVSLVGIELLAVEARVVVAGVDTYLK | 141 |
| aerosaccus_gvpA1 | YAEAVGLTAGAEAA* | |
| Lyngbya-confervoides- | MAVEKVNSSSSLAEVVDRILDKGIVVDAWVRVSLVGIELLAIEARVVIASVETYLKY | 142 |
| BDU141951_gvpA | AEAVGLTAQAAVPAS* | |
| Nostoc-punctiforme- | MAVEKVNSSSSLAEVIDRILDKGIVIDAWVRVSLVGIELLSIEARIVIASVETYLRYAE | 143 |
| PCC-73102_gvpA | AVGLTSQAAVPSAA* | |
| Nostoc-sp-PCC- | MAVEKTNSSSSLAEVIDRILDKGIVVDAWVRVSLVGIELLAIEARIVIASVETYLKYAE | 144 |
| 7120_gvpA | AVGLTQSAAMPA* | |
| Microchaete- | MAVEKTNSSSSLAEVIDRILDKGIVVDAWVRVSLVGIELLAIEARIVIASVETYLKYAE | 145 |
| diplosiphon_gvpA | AVGLTQSAAVPA* | |
| Microcystis- | MAVEKTNSSSSLAEVIDRILDKGIVIDAWARVSLVGIELLAIEARVVIASVETYLKYAE | 146 |
| aeruginosa-NIES- | AVGLTQSAAVPA* | |
| 843_gvpA1 | | |
| Microcystis- | MAVEKTNSSSSLAEVIDRILDKGIVIDAWARVSLVGIELLAIEARVVIASVETYLKYAE | 147 |
| aeruginosa-NIES- | AVGLTQSAAVPA* | |
| 843_gvpA2 | | |
| Microcystis- | MAVEKTNSSSSLAEVIDRILDKGIVIDAWARVSLVGIELLAIEARVVIASVETYLKYAE | 148 |
| aeruginosa-NIES- | AVGLTQSAAVPA* | |
| 843_gvpA3 | | |
| Microcystis-flos- | MAVEKTNSSSSLAEVIDRILDKGIVIDAWARVSLVGIELLAIEARVVIASVETYLKYAE | 149 |
| aquae-TF09_gvpA | AVGLTQSAAVPA* | |
| Phormidium-tenue- | MAVEKVNSSSSLAEVVDRILDKGIVIDAWVRVSLVGIELLAIEARVVIASVDTYLKYA | 150 |
| NIES-30_gvpA | EAVGLTAQAAVPAA* | |
| Planktothrix- | MAVEKVNSSSSLAEVIDRILDKGIVIDAWVRVSLVGIELLSIEARIVIASVETYLKYAE | 151 |
| agardhii_gvpA | AVGLTAQAAVPSV | |
| Planktothrix- | MAVEKVNSSSSLAEVIDRILDKGIVIDAWVRVSLVGIELLSIEARIVIASVETYLKYAE | 152 |
| rubescens_gvpA | AVGLTAQAAVPSV* | |
| Pseudanabaena- | MAVEKVNSSSSLAEVIDRILDKGIVIDAWVRVSLVGIELLSIEARVVIASVETYLKYAE | 153 |
| galeata-PCC- | AVGLTASAAVPAA | |
| 6901_gvpA | | |
| Stella-vacuolata_ | MAVEKINASSSLAEVVDRILDKGVVVDAWVRVSLVGIELLAVEARVVVAGVDTYLK | 154 |
| gvpA | YAEAVGLTAGAQTA* | |
| Trichodesmium- | MAVEKVNSSSSLAEVIDRILDKGVVVDAWIRLSLVGIELLTIEARIVVASVETYLKYAE | 155 |
| erythraeum- | AVGLTTLAAAPGEAAA* | |
| IMS101_gvpA3 | | |
| Trichodesmium- | MAVEKVNSSSSLAEVIDRILDKGVVVDAWVRLSLVGIELLTIEARIVIASVETYLKYAE | 156 |
| erythraeum- | AVGLTTLAAEPAA* | |
| IMS101_gvpA4 | | |
| Tolypothrix-sp.-PCC- | MAVEKTNSSSSLAEVIDRILDKGIVVDAWVRVSLVGIELLAIEARIVIASVETYLKYAE | 157 |
| 7601_gvpA1 | AVGLTQSAAVPA* | |
| Tolypothrix-sp.-PCC- | MAVEKTNSSSSLAEVIDRILDKGIVVDAWVRVSLVGIELLAIEARIVIASVETYLKYAE | 158 |
| 7601_gvpA2 | AVGLTQSAAVPA* | |
| Halo-family- | MAQPDSSSLAEVLDRVLDKGVVVDVWARXSLVGIEILTVEARVVAASVDTFLHYA | 159 |
| consensus_gvpA | EEIAKIEQAELTAGAEA-XPAPEA | |
| Halobacterium- | MAQPDSSGLAEVLDRVLDKGVVVDVWARVSLVGIEILTVEARVVAASVDTFLHYA | 160 |
| salinarum_gvpA1 | EEIAKIEQAELTAGAEAAPEA | |
| Halobacterium- | MAQPDSSSLAEVLDRVLDKGVVVDVWARISLVGIEILTVEARVVAASVDTFLHYAE | 161 |
| salinarum_gvpA2 | EIAKIEQAELTAGAEAPEPAPEA | |
| Halobacterium- | MAQPDSSGLAEVLDRVLDKGVVVDVWARVSLVGIEILTVEARVVAASVDTFLHYA | 162 |
| salinarum-NRC- | EEIAKIEQAELTAGAEAAPEA* | |
| 1_gvpA1 | | |
| Halobacterium- | MAQPDSSSLAEVLDRVLDKGVVVDVWARISLVGIEILTVEARVVAASVDTFLHYAE | 163 |
| salinarum-NRC- | EIAKIEQAELTAGAEAPEPAPEA* | |
| 1_gvpA2 | | |
| Haloferax- | MVQPDSSSLAEVLDRVLDKGVVVDVWARISLVGIEILTVEARVVAASVDTFLHYAE | 164 |
| mediterranei-ATCC- | EIAKIEQAELTAGAEAAPTPEA* | |
| 33500_gvpA | | |
| Halogeometricum- | MAQPDSSSLAEVLDRVLDKGVVVDVWARVSLVGIEILTVEARVVAASVDTFLHYA | 165 |
| borinquense-DSM- | EEIAKIEQAELTATAEAAPTPEA* | |
| 11551_gvpA | | |
| Halopenitus-persicus- | MAQPDSSGLAEVLDRVLDKGVVVDVWARVSLVGIEILTVEARVVAASVDTFLHYA | 166 |
| strain-DC30_gvpA | EEIAKIEQAELTAGAEAAPEA | |
| Haloquadratum- | MAQPDSSSLAEVLDRVLDKGIVVDTFARISLVGIEILTVEARVVVASVDTFLHYAEEI | 167 |
| walsbyi-C23_gvpA | AKIEQAELTAGAEA* | |
| Halorubrum- | MAQPDSSSLAEVLDRVLDKGVVVDVYARLSLVGIEILTVEARVVAASVDTFLHYAE | 168 |
| vacuolatum-strain- | EIAKIEQAELTAGAEAAPTPEA* | |
| DSM-8800_gvpA | | |
| Halopiger- | MAQPQRRPDSSSLAEVLDRILDKGVVIDVWARISVVGIELLTIEARVVVASVDTFLH | 169 |
| xanaduensis_gvpA1 | YAEEIAKIEQATAEGDLEELEELEVEPRPESSPQSAAE* | |
| Natrialba-magadii- | MAQPQRRPDSSSLAEVLDRVLDKGVVIDIWARVSVVGIELLTVEARVVVASVDTFL | 170 |
| ATCC-43099_gvpA | HYAEEIAKIEQATAEGDLEDLEELEVEPRPESSPKSATE* | |
| Natrinema- | MAQPQRRPDSSSLAEVLDRVLDKGVVIDVWARISVVGIELLTIEARVVVASVDTFL | 171 |
| pellirubrum-DSM- | HYAEEIAKIEQATAEGDLDELEELEVEPRPESSPKSAE* | |
| 15624_gvpA1 | | |
| Natronobacterium- | MAQPQRRPDSSSLAEVLDRILDKGVVIDVWARVSVVGIELLTIEARVVVASVDTFL | 172 |
| gregoryi-SP2_gvpA1 | HYAEEIAKIEQATAEGDLEDLEELEVEPRPESSPQSATE* | |
| Methanosaeta- | MVTSTPDSSSLAEVLDRILDKGIVVDVWARVSLVGIEILTVEARVVVASVDTFLHYS | 173 |
| thermophila_gvpA1 | EEMAKIEQAAIAAAPSA* | |
| Methanosaeta- | MVTSTPDSSSLAEVLDRILDKGIVVDVWARVSLVGIEILTVEARVVVASVDTFLHYS | 174 |
| thermophila_gvpA2 | EEMAKIEQAAIAAAPGVPA* | |
| Methanosarcina- | MVSQSPDSSSLAEVLDRILDKGIVVDVWARVSLVGIEILAIEARVVVASVDTFLHYA | 175 |
| barkeri-3_gvpA1 | EEITKIEIAAKEEKPAIAA* | |
| Methanosarcina- | MVSQSPDSSSLAEVLDRILDKGIVVDTWARVSLVGIEILAIEARVVVASVDTFLHYA | 176 |
| vacuolata_gvpA1 | EEITKIEIAAREEKPVIAA* | |
| Methanosarcina- | MVSQSPDCSSLAEVLDRILDKGIVVDTWARVSLVGIEILAIEARVVVASVDTFLHYA | 177 |
| vacuolata_gvpA2 | EEITKIEIAAREEKPVIAA* | |
| Haladaptatus- | MVQAEPNSSSLADVLDRILDKGVVIDVWARISVVGIEVLTVEARVVVASVDTFLHY | 178 |
| paucihalophilus- | AKEMAKLERASSEDEIDFEQVEVASPEASTS* | |
| DX253_gvpA | | |
| Mega-family- | MSIQKSTXSSSLAEVIDRILDKGIVIDAFARVSXVGIEILTIEARVVIASVDTWLRYAEA | 179 |
| consensus_gvpA | VGLL-D-VEE-GLP-RX- | |
| Bacillus- | MSIQKSTDSSSLAEVIDRILDKGIVIDAFARVSLVGIEILTIEARVVIASVDTWLRYAEA | 180 |
| megaterium_gvpA | VGLLTDKVEEEGLPGRTEERGAGLSF* | |
| Bacillus- | MSIQKSTNSSSLAEVIDRILDKGIVIDAFARVSVVGIEILTIEARVVIASVDTWLRYAE | 181 |
| megaterium_gvpB | AVGLLRDDVEENGLPERSNSSEGQPRFSI* | |
| Serratia-family- | MAKVQKSTDSSSLAEVVDRILDKGIVIDAWXKVSLVGIELLSIEARVVIASVETYLKY | 182 |
| consensus | AEAIGLTAXAAAPA* | |
| Burkholderia-sp- | MAKVQKSTDSSSLAEVVDRILDKGIVIDVWAKVSLVGIELLSIEARVVIASVETYLKY | 183 |
| Bp5365_gvpA1 | AEAIGLTATAAAPTA* | |
| Desulfobacterium- | MAKVQKTTDSSSLAEVVDRILDKGIVVDAWAKISLVGIELISIEARVVIASVETYLKY | 184 |
| vacuolatum-DSM- | AEAIGLTAAAAAPA* | |
| 3385_gvpA | | |
| Desulfomonile-tiedjei- | MAKIAKSTDSSSLAEVVDRILDKGIVIDAWAKVSLVGIELLSVEARVVIASVETYLKY | 185 |
| DSM-6799_gvpA1 | AEAIGLTASAAAPA* | |
| Isosphaera-pallida- | MAKVTKSTDSSSLAEVVDRILDKGIVIDAFAKVSLVGIELLSVEARVVIASVETYLKYA | 186 |
| ATCC-43644_gvpA1 | EAIGLTASAATPA* | |
| Lamprocystis- | MAKVANSTDSSSLAEVVDRILDKGIVIDAWIKVSLVGIELLAIEARIVIASVETYLKYA | 187 |
| purpurea-DSM- | EAIGLTAPAAAPA* | |
| 4197_gvpA1 | | |
| Lamprocystis- | MAKVANSTDSSSLAEVVDRILDKGIVIDAWLKVSLVGIELLAVEARVVIASVETYLKY | 188 |
| purpurea-DSM- | AEAIGLTAPAAAPA* | |
| 4197_gvpA2 | | |
| Legionella-drancourtii- | MAKVQKSTDSSSLAEVIDRILDKGIVIDVWAKVSLVGIELLSIEARVVIASVETYLKYA | 189 |
| LLAP12_gvpA1 | EAIGLTATASHPA* | |
| Psychromonas- | MANVQKTTDSSGLAEVIDRILDKGIVIDAFVKVSLVGIELLSIEARVVIASVETYLKYA | 190 |
| Ingrahamii_gvpA1 | EAIGLTASAATPA* | |
| Psychromonas- | MANVQKSTDSSGLAEVVDRILEKGIVIDAFVKVSLVGIELLSIEARVVIASVETYLKYA | 191 |
| Ingrahamii_gvpA4 | EAIGLTASAATPA* | |
| Serratia-39006_gvpA1 | MAKVQKSTDSSSLAEVVDRILDKGIVIDAWVKVSLVGIELLSIEARVVIASVETYLKY | 192 |
| | AEAIGLTASAATPA* | |
| Thiocapsa-rosea- | MAKVANSTDSSSLAEVVDRILDKGIVIDAWVKVSLVGIELLAIEARVVIASVETYLKY | 193 |
| strain-DSM-235- | AEAIGLTAPAAAPA* | |
| Ga0242571-11_gvpA1 | | |
| Other gvpAs | | |
| Bradyrhizobium- | MAIEKATASSSLAEVIDRILDKGVVIDAFVRVSLVGIELLSIELRAVVASVETWLKYAE | 194 |
| oligotrophicum- | AIGLVAQPMPA* | |
| S58_gvpA1 | | |
| Desulfotomaculum- | MAVKHSVASSSLVEVIDRILEKGIVIDAWARVSLVGIELLAIEARVVVASVDTFLKYA | 195 |
| acetoxidans-DSM- | EAIGLTKFAAVPA* | |
| 771_gvpA1 | | |
| Octadecabacter- | MAVNKMNSSSSLAEVVDRILDKGVVIDAWVRVSLVGIELIAVEARVVIAGVDTYLK | 196 |
| antarcticus-307_gvpA1 | YAEAVGLTAEA* | |
| Octadecabacter- | MAVSKMNSSSSLAEVVDRILDKGVVIDAWVRVSLVGIELIAVEARVVIAGVDTYLK | 197 |
| arcticus-238_gvpA1 | YAEAVGLTAEA* | |
| Pelodictyon-luteolum- | MAVEKTIGSSSLVEVIDRILDKGVVVDAWVRMSLVGIELLAIEARVVVASVETYLKY | 198 |
| DSM-273_gvpA1 | AEAIGLTAKAA* | |
| Pelodictyon-luteolum- | MAVEKTIGSSSLVEVIDRILDKGVVVDAWVRVSLVGIELLAIEARVVVASVETYLKY | 199 |
| DSM-273_gvpA2 | AEAIGLTAKAA* | |
| Pelodictyon- | MSVEKTIGSSSLVEVIDRILDKGVVVDAWVRVSLVGIELLAIEARVVVASVETYLKYA | 200 |
| phaeoclathratiforme_ | EAIGLTAKAA* | |
| gvpA1 | | |
| Rhodobacter- | MAIEKSLASASIAEVIDRVLDKGIVVDAFVRISLVGIELLAIELRAVVASVETVVLKYAE | 201 |
| capsulatus-SB- | AIGLTVDPQTP* | |
| 1003_gvpA1 | | |
| Rhodobacter- | MAIEKSVASASIAEVIDRILDKGVVIDAFVRVSLVGIELIAIEVRAVVASIETWLKYAE | 202 |
| sphaeroides_gvpA1 | AVGLTVDPATT* | |
| gvpF | | |
| Anabaena-flos- | MSIPLYLYGIFPNTIPETLELEGLDKQPVHSQVVDEFCFLYSEARQEKYLASRRNLLT | 203 |
| aquae_gvpF | HEKVLEQTMHAGFRVLLPLRFGLVVKDWETIMSQLINPHKDQLNQLFQKLAGKR | |
| | EVSIKIFWDAKAELQTMMESHQDLKQQRDNMEGKKLSMEEVIQIGQLIEINLLAR | |
| | KQAVIEVFSQELNPFAQEIVVSDPMTEEMIYNAAFLIPWESESEFSERVEVIDQKFG | |
| | DRLRIRYNNFTAPYTFAQLDS* | |
| Ancylobacter | MSATLSAPGTANVAVEATAAADGKYLYGIIEAPAPATFDVPAIGGRGDVVHTIALG | 204 |
| aquaticus strain | RLAAVVSNSPRIDYDNSRRNMLAHTKVLEAVMARHTLLPVCFGTVGSDAEVIIEKI | |
| UV5_gvpF | LRERRDELAGLLGQMHGRMELGLKASWREEIIFEEVLAENPAIRKLRDALVGRSPD | |
| | QSHYERIQLGERIGQALQRKRQDDEERILERVRPFVHKTRLNKLIGDRMVINAAFL | |
| | VDAAVESRLDASIRAMDEEWGGRLAFKYVGPVPPYNFVTITIHW* | |
| Aphanizomenon flos- | MNTGLYLYGIFPDPIPETVDLQGLDKQSVHSQVVDGFSFLYSDACQEKYLASRRNL | 205 |
| aquae NIES-81_gvpF | LTHEKVLEQAMHEGFHVLLPLRFGLVVKDWETIQKQLIEPYKEQLNELFQKLAGQR | |
| | EVSIKILWDSKSELQAMMESNQDLKQQRDNMEGKKLKMEEIIQIGQLIESNLAAR | |
| | KQTVIQEFFNNLHPLAKEIIESEPMTEEMIYNAAFLIPWETESVFSERVEAIDRKFGD | |
| | RLRIRYNNFTAPYTFAQLAS* | |
| Aphanothece | MAEGFYLYGIFPPPGPQTIAVQGLDKQPIFSHTVEGFTFLYSEAQQSRYLASRRNLI | 206 |
| halophytica (strain | THTKVLEEAMEQGFRTLLPLQFGLVVPDWESVSQDLLQHQSETLQLLFQRLEGKR | |
| PCC 7418)_gvpF | EVSLKIYWETDAELNALLEENPDLKARRDNLEGKNLSMDEVIQIGQALEQAMERR | |
| | KQEVITRFEDALIPFAVETQENDVLTETMIYNTAFLIPWESEPEFGEAVETVDAEFA | |
| | PRLKIRYNNFTPPYNFVELRE* | |
| Aquabacter spiritensis | MMQTDTLAPAETVAEGKYLYCLIDAPAPDTFASPGIGGRGDVVHTITVGRLAAVV | 207 |
| strain DSM 9035_gvpF | SDSPRIEYENSRRNMMAHTKVLEEVMARHTMLPVCFGTVATGPDPISGKILEGRR | |
| | DELVGLLEQMRGRLELGLKATWREDVIFAEILQENPAIAKLRDSLVGRSPEKSHFER | |
| | IRLGEMIGQAMERKRRDDEERILERVRPFVHKTKLNKPIGDRMILNAAVLVEAARE | |
| | AGLDQAVRQMDAEWGARLSFKYVGPVPPYNFVTITIHW* | |
| Bacillus- | MSETNETGIYIFSAIQTDKDEEFGAVEVEGTKAETFLIRYKDAAMVAAEVPMKIYH | 208 |
| megaterium_gvpF | PNRQNLLMHQNAVAAIMDKNDTVIPISFGNVFKSKEDVKVLLENLYPQFEKLFPAI | |
| | KGKIEVGLKVIGKKEWLEKKVNENPELEKVSASVKGKSEAAGYYERIQLGGMAQK | |
| | MFTSLQKEVKTDVFSPLEEAAEAAKANEPTGETMLLNASFLINREDEAKFDEKVNE | |
| | AHENWKDKADFHYSGPWPAYNFVNIRLKVEEK* | |
| Bradyrhizobium | MSNQPIYVYGLIRAEDHQPLAVRAVGDSEQPVNIIGSGNVAALVSTIDLPEIMPTR | 209 |
| oligotrophicum | RHMLAHTKVLEAAMANGPVLPMRFGIIVPNPATLLRVIGFRHQELRARLDEIDGRI | |
| S58_gvpF | EVALKASWDEQFMWRQLASEHPDLAVSGRTMMGRGEQQSYYDRIELGRAIGA | |
| | ALEERRTAARLQLLQTVTPFAVQVKELTPVDDAMFAHLALLVEKGAEPSLYQTVEA | |
| | LERSNDSGLKFRYVAPIPPYNFVAVTLDWEQHEQAPRR* | |
| Burkholderia | MNSRNGARYLYAVQHARDVPASLPAGIGGAAVRALTDGDVAAIVSDTGLAKVRP | 210 |
| thailandensis sp. | ERRHLLAHHTVIQSLAAAGTVLPVAFGTIATSEVALRRMLRKHRNALAGELARLVD | |
| Bp5365 strain | HVEMSVRLNWDVTDLFRHLIDVRPDLKAARDAMLALGSAVTRDDKIELGSRFERV | |
| MSMB43_gvpF | LNEERARHAALVDEALDACCKEIRRDPPRHETEILHLTCLVRHAELGRFESGVAAAS | |
| | RELDDSLVLKYSGPCPPHHFVNLNMSL* | |
| Chlorobium luteolum | MERDGKYIYCIIGADCECDFGPIGIGGRGDLVSTIGFEGISMVVSDHPLNRFVVDPD | 211 |
| DSM 273_gvpF1 | GILAHQRVIEAVMKEHESVIPVRFGTVAATPDEIRNLLDRRYGELSELLLRLRNKVEF | |
| | NVTGRWHDMAAIYKEVERTHPEIKEQRARIESMRDGDGEALKQSLILDTGHQIEA | |
| | ALEVMKEEKFDAVASLFRKTAMASKMNRTTSPDMFMNAAFLIDRGREVEFDGI | |
| | MEILGQKDADRCDYRYSGPLAIFNFVDLRILPEKWEL* | |
| Chlorobium luteolum | MAHEAAEQDGLYIYGIINNSGELDFGPIGIGGREERVYAVIHNDIAAVVSRTVVKEF | 212 |
| DSM 273_gvpF2 | EPRRANMIAHQKVLEAVMVSHAVLPVRFSTVSPGHDDMKVEKILEEDYLRLKKLL | |
| | VKMEGKKEMGLKVMANEEKVYESIITGYDNIRYLRDKLINLPPEKTHYQRVKIGELV | |
| | AAALEKEVGTYKDAVLDALSPIAEEVKVNDSYGSMMVLNAAFLIRTAREEEFDRAV | |
| | NALDDRYHDMMTFKYVGTLPPYNFVNISINIKGR* | |
| Chlorobium luteolum | MNQSIYIYGIVNEPALAASFVETDPDIYAVASMGCSAIVENRPAIDLGELDRESLAR | 213 |
| DSM 273_gvpF3 | MLLQHQQTLERLMESGMQLIPLKLGTFVSSAADAACIIEDGYNLIERIFRETEDAHE | |
| | LEVVVKWSSFADLLQEVVSEGDVQELKREVEARQSSSTEDAIAVGRLIKEKIDRRNA | |
| | ALSASVLRQLGERASQSKRHETMDDEMVLNAAFLVNRGDVDAFVATVEALDSQY | |
| | LNALHFRIVGPLPCYSFYTLEVTALFEEFIAEKRAVLGLDARSCEADVKKAYHAKAKV | |
| | AHPDVHVPAGANNGADFTVLNEAYMTLHDYYSALRNSASSRHGHEGQDSSSVV | |
| | FSVKILN* | |
| Dactylococcopsis | MTEGFYLYGIFPPPGPKTIETQGLDKQPIFSHTVEGFTFLYSEAQQSRYLASRRNLIT | 214 |
| salina PCC 8305_gvpF | HTKVLEEAMENGSRTLLPLQFGLIVPDWETVVQDLLQHQAESLHFFLEKLEGKREV | |
| | SLKIYWETNAELNALLEENPALKARRDNLEGKQLSMDEVIQIGQALEQEMEGRKQ | |
| | DIISRFEEVLIPFAFEIKENDVLTETMIYNTAFLINWDAESDFGEQLEAIDAEFSPRLKI | |
| | RYNNFTPPYNFVELRE* | |
| Desulfobacterium | MSKKNLKRNGRYLYAIIEASEEKTFGSIGMDGSDVYLIVEDKTAAVVSDVPNKKIRP | 215 |
| vacuolatum_DSM | QRKNIAAHHAVLNKIMEEITPLPMAFGIIADGEQAIRKILADNRDVFREQFATVSG | |
| 3385_gvpF | KVEMGMRISYDVPNIFEYFISTDSEIRAARDQYFGGNREPSQEAKLELGRMFNRQL | |
| | NANREEYTNQVIEILDDYCDDIKENKCRNEQEVTSLACLINRSDQKRFEEGVFESAR | |
| | HFDNNFSFEYNGPWSPHNFVNILIEL* | |
| Desulfomonile tiedjei | MEKATIKTTGSNGRYLYAVVPGSQERVYGCLGINGGNVYTIAAKDVAAVVSDVPH | 216 |
| DSM 6799_gvpF | QKIRPERRHFAAHQAVLKRVMLDGDLLPMSFGIISQGPKAVRAILSRNNKSVQQQ | |
| | LKRISGKAEMGIKVTWDVPNIFEYFIDVNRELREARNKLVQPNYLPTQQEKIEIGR | |
| | MFEEILNLERERHTKQVERVMSKRCSEIKRSKCRTEIEVMNLSCLVDRTLLSDFEAG | |
| | VLEAASHFDDSFAFDFNGPWAPHNFVDLEIDV* | |
| Desulfotomaculum | MSTGRYVYCVINSIEPLTFMSGPVGNEPEGVFTVHYKELAAVVSQSSEEKYNVCRE | 217 |
| acetoxidans_DSM | NTIAHQKVLEEVLVSHPLLPVRFGTVAQNEEIVKKFLLQERYAELRSMLHNVTGKV | |
| 771_gvpF1 | QMGLKVLWTDMKTVYQEIVEENPQIKNLKKKLESKPAETIHYEMIDLGQMVNQA | |
| | LLRKKEKQKEMVLKPLQKIALETKESFLYGDQMFVNADFLISRSSLDDFNAKVNELG | |
| | EFFNEQALFKYIGPLPPYNFVTLYVNF* | |
| Desulfotomaculum | MVKNHNTDHLKELYIYGLIGGTPFKDELEKISVIQENTPIYGVWHKNIGFAVSAAPD | 218 |
| acetoxidans_DSM | YPLKDLSKESIIQLFVDHQQVLECLRQKFSLIPVKLGTVLESVTEAAAVLANNEEKFN | |
| 771_gvpF2 | DLLNYLKDKVELNLSVSWNDLNEVVAKIGEEDEVKKLKQSLLAQEQVSQEDLIKIGK | |
| | IISFQMQQKKQAAREYIISELRNLWEDYFINEVVDENSILNLTLLAITGKVDDVNKKI | |
| | EYLNQIYRDSLDFSLTKSLLPQGFSTVSIKKITMDQLLLAKDILKLPDTASLQDINAAR | |
| | RALLHCYHPDKNDHAAVNKVQEINAAYKLLEEYCQENSSDFNVDLITDYYIMKVIK | |
| | ADKSNVNSMNME* | |
| Dolichospermum | MNTDLAHKNFGLYLYGIFPDTIPETLEIKGLDGKSVHSQVVDGFTFLYSQACQEKYL | 219 |
| circinale_gvpF | ASRRNLLAHERVLEQTMHEGFHVLLPLRFGLVVKDWETIMSQLINPHKEQLHKLF | |
| | EKLAGQREVSIKILWDAKAELQAMMESNHDLRQQRDNMEGKKLSMEEVIQIGQ | |
| | LIESNLQARKQAVIEVFTRELNPLAQEIVVSEPMTEEMIYNAAFLIPWDSEPLFSERV | |
| | ESIDQKFGNRLRIRYNNFTAPYTFALLDS* | |
| Enhydrobacter | MNPPEAYIAGRTAAKSVEDRKARPQDLAEGKYVYAIIACDEPREFKNRGIGERGDK | 220 |
| aerosaccus strain | VHTINHRQMAAVVSDSPTIDYERSRRNMMAHTVVLEEVMKEFDLLPLRFGTVAS | |
| ATCC 27094_gvpF | SAESVERQLLVPRYGELSAMLEKMRGRSEFGLKAFWHEGVAFGEIVRENARVRKL | |
| | RDALQGRSLEESYYQRIQLGEEVEKALTAIRARDEELILSRLRPFMRDIRTNKIISDR | |
| | MVLNAAFLVERGDVPALDEAIRQLDQEFSERLMFKYVGPVPPYNFVNIAINWER* | |
| Isosphaera | MRNAPPTRPGSVTPASPGKPVIDGPARYLYAFTHDLPEGPLADLEGLPGARVVVV | 221 |
| pallida_ATCC- | ADGRVAAVVSPCPLGKVRPERQRVAGHHHVLKHLQDTLGKAILPASFGMVADSE | |
| 43644_gvpF | EDLRALLRHHSAAIAEGLVRVQGKVEMTVKLRWAPDNVAQAVLGRDPELRQLRD | |
| | QLYSNGQTPTRDQSLDLGRRFHHALERQRDHYAAYLRAALSPLLSELVEEDLRDER | |
| | DLVHWACLIENQRRAGFEAALDRLAEELEDDLVLELTGPWPPHHFVDLDLDDDH | |
| | DDDEEE* | |
| Legionella drancourtii | MDSTSKKPAASNLYLYAIASVNENQEPISFHGIEEQPIDLVPYKDIMLVVSNLSKKK | 222 |
| LLAP12_gvpF | VRPERKNVAVHHAVLNHLMKHNTSMLPIRFGMIADNRKEVQRLLTINYDMLHTK | |
| | LKMMAGRVEMGVSLSWDVPNIFEYLLNRHSQLRETRDKLLANPAHEPSRDEKIEI | |
| | GALFSQILDEEREVYTDTILSLLSPVCCDVVKSTYRNDTEIMNIFCLISAARRDEFEEKI | |
| | IEASTILDDNFVIKYTGPWPPHNFSKLNLSLE* | |
| Lyngbya confervoides | MPQLLYLYGIFPAPGPQDLEVQGLDQQPIHTHIIDEFVFLYSVAQQERYLASRKNLL | 223 |
| BDU141951_gvpF | GHERVLEAAMKVGYRTLLPLQFGLIIETWDRVIKELITPRGDALKRLFAKLEGRREV | |
| | SVKLLWGPDAELNQLMEEDAGLRAERDRLEGQQLSMDQIVDIGQAIETAMTERK | |
| | DDVINAFRQRLNALAIEVLENDPLTDAMIYNTAYLIPWEDEVKFSQAIEELDEQFED | |
| | RLRIRYNNFTAPYNFAQLDQLS* | |
| Microcystis aeruginosa | MTVGLYLYGIFPEPVPDGLVLQGIDNEPVHSEMIEGFSFLYSAAHKEKYLASRRYLIC | 224 |
| NIES-843_gvpF | HEKVLETVMEAGFTTLLPLRFGLVIKTWESVTEQUSPYKTQLKELFAKLSGQREVSI | |
| | KIFWDNQWELQAALESNPKLKQERDAMMGKNLNMEEIIHIGQLIEATVLQRKQD | |
| | IIQVFRDQLNHRAQEVIESDPMTDDMIYNAAYLIPWEQEPEFSQNVEAIDQQFGD | |
| | RLRIRYNNLTAPYTFAQLV* | |
| Nostoc punctiforme | MSFYIYGILTLPAPQNLNLEGLDRQPVQIKILDDFAVIYSEAQQERYLASRRNLLSHE | 225 |
| ATCC 29133_gvpF | KVLEEIMQAGDRYLLPVQFGLLVSSWETVSQQLIRPHQEELTQLLAKLSGCREVSV | |
| | KVFWDTEAEIQGLLAEHPNLKTERDKLVGQPLSMERVIQIGQVIEQGMSDRKQGII | |
| | DVFKGTLNSIAIEVVENTPQVDTMIYNSAYLIPWEAESQFSEHVESLDRQFENRLRI | |
| | RYNNFTAPYNFARLRLTTSN* | |
| Nostoc sp. PCC | MSSGLYLYGIFPDPIPETVTLQGLDSQLVYSQIIDGFTFLYSEAKQEKYLASRRNLISH | 226 |
| 7120_gvpF | EKVLEQAMHAGFRTLLPLRFGLVVKNWETVVTQLLQPYKAQLRELFQKLAGRREV | |
| | SVKIFWDSKAELQAMMDSHQDLKQKRDQMEGKALSMEEVIHIGQLIESNLLSRK | |
| | ESIIQVFFDELKPLADEVIESDPMTEDMIYNAAFLIPWENESIFSQQVESIDHKFDER | |
| | LRIRYNNFTAPYTFAQIS* | |
| Octadecabacter | MKREVVRMTDENTINSKYLYAIIKCREQREFIARGIGERGDAVHTIAYKGLAAVVSD | 227 |
| antarcticus 307_gvpF1 | SPVMEYDQSRRNMMAHTAVLEELMEEFTLLPVRFNTVAPEAGAIEERLLVPRHEE | |
| | FTQLLGQIDKRVELGIKAFWHDGMIFEEVLRENDSIRKMRDALEGKSVDGSYYERI | |
| | QLGEKIEQAMIKKRVEDEEIILSRIRQHVHKSRSNKTIGDRMVLNGAFLVDANKES | |
| | DFDKAVQLLDQDLGNRLMFKYVGPVPPYNFVNIVVNWGVV* | |
| Octadecabacter | MTVVAEENMTGSVGLYVCAIVAEWESNSALIKCANEAQGEIQLIGQGGITAVVM | 228 |
| antarcticus 307_gvpF2 | VPPEDQPVSRDRQELVRQLLVHQQLVERFTEIAPVLPVKFGTLAPDRESVELGLER | |
| | GREKFFTAFGGLSGKTQFEITVTWDVADVFAKIAKLPAVVKLKVDLVATSESDRPIN | |
| | LDRVGRLVKETLDHQRAQTGKVLLDALLPLGVDSIVNPILNDSIVLNLALLVDTDQA | |
| | DALDRCLDELDSTFHGALSFRCVGPMPPHSFATVEINYIEPTQVSHACCVLELDAA | |
| | HNFEEIRSAYHRLARQTQQDIAPDVVVDNKSSSVGIAVLNDAYKTLLSFVDAGGPV | |
| | VVSVQRQEDAYATDIPSSGG* | |
| Octadecabacter | MTDEKKVNSKYLYAIIQCREPRELKARGIGERGDVVHTVVHKGLAAVVSDSPVME | 229 |
| arcticus 238_gvpF1 | YDQSRRNMMAHTAVLEELMEEFTLLPVRFNTVAPEAVAIEERLLVPRHDEFTQLL | |
| | GQIDKRVELGLKAFWHDGMIFGEVLRENDSIRKMRDSLKGQSVDGSYYERIQLGE | |
| | KIEKALTEKRLEDEEMILSRIRPHVHKSRSNKTIGDRMVLNGAFLVDAEKESKFDEA | |
| | VQSLDQDLSDRLMFKYVGPVPPYNFVNIVVNWGES* | |
| Octadecabacter | MRAQKVIPAAEENISGNVGLYVCAIVAERVSCSALIQCANDAPGEIQLIGHGDFTA | 230 |
| arcticus 238_gvpF2 | VVMVPEKDQLVSPDRKELMQQLLVHQQLIEKFMEIAPVLPVKFATLAPNRESVEL | |
| | GLEVGSEKFSAAFNSLSGKVQFEVIVTWDVAEVFAEIAKEPAVAKLKVDLAAMPES | |
| | YGSVSLEQLGKLVKETLELRRAETGKVLLDALVQVGVDNVVNSILDDSIILNLALLVE | |
| | AKRADAFDRCLDELDSTYHGALTFRCVGPLPPHSFATVEITYLEPAKVTEACDILELD | |
| | VARSTEEVRSAYHRLARKSHPDIVPDVAVGETASVSMAVLTDAYKTLLSFVGAGGS | |
| | VVVSVQRQEASYAADIISSAG* | |
| Pelodictyon | MDIETTKEGRYIYGIIRNSEFIDFGQIGIGKRNDRVYGVIYKDICAVVSSTPIIQYEARR | 231 |
| phaeoclathratiforme_ | ANMIAHQKVLEEVMKRFNVLPVRFSTISPHDNDDAIIKILITDYSRFDELLIKMKGK | |
| gvpF1 | KELGLKVMADETRIYENIIQKYDNIRSLRDKLLNQPADKIHYQRVKIGEMVADALKK | |
| | EIESYKQQILDILSPIAEDIKITDNYGNLMILNAAFLIKEVKESEFDDSVNKLDEKYGNI | |
| | MTFKYVGTLPPYNFVNLSINTKGV* | |
| Pelodictyon | MEKDGKYVYCIIASTYECNFGAIGIGGRGDLVNTIGFQGLSMVVSDHPLNHFVLNP | 232 |
| phaeoclathratiforme_ | DNILAHQRVIEVVMSQFNSVIPVRFGTVAATPDEIRNLLDRRYGELSELLERFENKV | |
| gvpF2 | EYNLKASWRCMIDIYKEIDKEHVELKQLRREIEGLKDEEKRKLLIVEAGHIIENELQKK | |
| | KEVEAYEIVTYLRKTVVAHKHNKTTGEAMFMNTAFLLNKGREVEFDNIMNDLGE | |
| | QYKDRSDYYYTGPLPIFNFIDLRILPEKWEL* | |
| Pelodictyon | MDRQGIYIYGFIPNHYLTDIKTILIESGIYSIEYGSIAALVSDTMVDDIEYLNREDLAYL | 233 |
| phaeoclathratiforme_ | LVDHQKKIELIMSTGCSTIIPMQLGTIVNSGNDVIKIVKNGLRIINKTFDDIADIQEFD | |
| gvpF3 | LVVMWNNFPDLIKKISDTPQIRIMKEEIANKGSYDQADSINIGKIIKKKIDEKNSKVN | |
| | LDIMNSLSSLCICVKKHESMNDEMPLNSAFLIKKDKENSFIEMVNQLDIKYENLLRY | |
| | KIVGPLPCYSFYTLESKLLNKKEIEKAEKILGIDAYKSESDIKKAYRAKAAHAHPDKNN | |
| | TISAIDNDDFIEINKAYQILLEYSSVFKDSPDHKPDEPFYLVKIKK* | |
| Phormidium tenue | MADRYYLYGIFPAPGPAELPLMGLDEQVVQAQQLGDFTFLYSLACQKRYLSSRKN | 234 |
| NIES-30_gvpF | LLGHEKVLEAAMEQGHRTLLPLQFGLIVESWNQVQEDLVTPYAEDLTQLFGRLNG | |
| | CREVSIKVQWEPSTELEMMMAENADLRAQRDQLEGTQLGMEQVIFIGQQIESAL | |
| | EERKQGIVDQFRQALSPLAKDVLENAPQTDVMIYNAAFLIPWESEAEFSQAVDAI | |
| | DSTFGDRLRIRYNNFTAPYNFAQLN* | |
| Planktothrix agardhii | MGNGLYLYGILPTNRVRPLALHGLDKQPIQTHPVDEFSFLYSETQQERYLASRRNLL | 235 |
| str. 7805_gvpF | GHEDVLEKVMQHGYRSVLPLQFGLIVKDWDHVKAQLIIPYQDRLKELFHKLEGKR | |
| | EVGVKIFWEETEELDLLMTENQELREKRDSLEGKRLSMDEIIGIGQEIERAMQDRQ | |
| | QGIIDKFQQILNPLAQEIVENDNLTSAMIYNAAYLIPWDIEPQFGDKIEELDHHFNN | |
| | RLRIRYNNFTAPFNFAQLNP* | |
| Psychromonas | MAENKKKVRKSSSKVIAKPKVIYAITAGGLQDLGNLVGINKSDIYTIEKESISFVVSDL | 236 |
| ingrahamii 37_gvpF | SPSSPRPRPDRRNIMAHNEILKQLMSKTSVLPVRFGTVATGERAVNRFCSQYNAQ | |
| | LLEQLDRVQDRVEMGIKVTWNVPNIYDYFVDNHSELREERDRVYDGNKNPRRDD | |
| | RINLGHMYDALVTEARLSHQTDLEEIILPGCDEIHSIPPKDEKVVVNLACLVQRADL | |
| | EVFEERVVEAGKTLDNTYDIELNGPWAPHNFVELDLKTMTGRR* | |
| Serratia sp. ATCC | MMSIDKSRNHRAKVLYALCVSDDSTPNYKIRGLEAAPVYSIDQDGLRAVVSDTLST | 237 |
| 39006_gvpF | RLRPERRNITAHQAVLHKLTEEGTVLPMRFGVIARNAEAVKNLLVANQDTIREHFE | |
| | RLDGCVEMGLRVSWDVTNIYEYFVATYPVLSETRDEIWNGNSNANNHREEKIRLG | |
| | NLYESLRSGDRKESTEKVKEVLLDYCEEIIENPVKKEKDVMNLACLVARERMDEFAK | |
| | GVFEASKLFDNVYLFDYTGPWAPHNFVTLDLHAPTAKKKTLTRAGTLSD* | |
| Stella vacuolata_ATCC- | MQTEALAPAAVAAEGKYLYCIIDAPAPATFASPGIGGRGDVVHTLAVGRLAAVVS | 238 |
| 43931_gvpF | DTPRIEYENSRRNMMAHTKVLEEVMAHHTLLPVCFGTVGSGDDVIAEKILEGRRE | |
| | ELSRLLEEMRGRVELGLKATWREEVIFAEVLDEDPAVRKLRDSLVGRSPEKSHFERI | |
| | RLGELIGQALLRKRRDEEERILDRVRPFVRKTKLNKPIGDRMILNAAFLVETAREAAL | |
| | DQSVREMDADWGARLSFKYVGPVPPYNFVTITIHW* | |
| Thiocapsa rosea strain | MQQAKRQDVAAGRYIYAIIPDRGDHSLGRIGLDESEVYTIGDGRVAAVVSDLSGG | 239 |
| DSM 235 | RIRPQRRNMAAHQEVLKQVLREVSPLPAAFGLMADDEAAIIRILKDNQDAFLNQL | |
| Ga0242571_11_gvpF | ERVDGSLEMGLRMSWDVPNIFEYFVGAHPELQELRDDFFRDGSNLTQDQMITLG | |
| | RSFERLLEQDREEYTEQVESVMRSCCREIKRNKCRTEKEVLHLACLVDRDAAGRFE | |
| | QVVLQAARPFDNNYAFDFNGPWAPHNFVEMDIHV* | |
| Tolypothrix sp. PCC | MDAGLYLYGIFSDPIPPTVSLKGLDSQPVYSQVIEGFTFLYSDAKQEKYLASRRNLIS | 240 |
| 7601_gvpF | HEKVLEQAMQEGFRTLLPLRFGLVVKNWETVISQLIQPCERQLRDLFQKLAGKREV | |
| | SVKILWDTKAELQAMMQSNPDLKQKRDQMEGKNLSMEEVIEIGQLIESNLQQRK | |
| | EAVIKTFFDELKPLAEEVVESEPMMEEMIYNAAFLIPWDQEALFSQRVEAIDKKFG | |
| | DRLRIRYNNFTAPYTFAQIS* | |
| Trichodesmium | MEFGFYVYGLIQEKGKMDESKDESKNGLKGSNESKDELKGLDKEDVKIQDVDEFA | 241 |
| erythraeum | VLYSIAKKERYLASRRNLITHEKVLESAMEAGYRNLLPMQFGLVVSEWEKFSQDFT | |
| IMS101_gvpF | KPCEQQIHDLFTKLKNNREVGIKIYWEPDAELEKLLENDKDLKEERDSLKDKKLTM | |
| | DQVIDIGQKIEQGMNERKQN11EIFQETLNKMAIEVIENEVQTEKMIYNAAYLIPW | |
| | DQEEDFGEKVETIDSKLCERGNFTIRYNSFTAPYNFARIRQQD* | |
| gvpF/L | | |
| Ancylobacter | MTDLLVFAVVPADRFDPAILAEGDGLPPGLRAIAAGPLAAVVGAAPEGGLKGRER | 242 |
| aquaticus strain | SALLPWLLASQKVMERLLANAPVLPVALGTVVEDEGRVRHMLDAGAAILGEGFQ | |
| UV5_gvpFL1 | AVGDGIEMNLSVLWHLDTVVARLLPGVAPELRQAAAGGDAIERQALGVVLAGLV | |
| | SAERRRARARVIEALQAVTRDFAIGEPTEPGGVVNLALLVDRAAEEALGAALEALD | |
| | AEFDGALTFRLVGPLPPYSFASVQVHLSPAAAVCGARAALGVEPDASPETVKAAYR | |
| | RAARETHPDLVPMGGEDEEAPEATADETSRFVVLSDAYRVLEGEHAPVSLRRLDS | |
| | VLTE* | |
| Ancylobacter | MLYVYAITADYAAGANHLLPAKGIVPGVPVQRFGTGALGAVASPVPVTVFGKEAL | 243 |
| aquaticus strain | HALLDDADWTRARILAHQRVVSSLLPLATVLPLKFGTLVAGEASLAAALTSQHDAL | |
| UV5_gvpFL2 | DATVARLRGAREWGVKLFFEAPTRTIRAEEPVGAGAGLAFFRRKKEEQETRAAAE | |
| | AALDRCVAASHRRLASHARAAVANPLQPPELHGHPGTMGLNGAYLVAAENEAA | |
| | WRVCFSELEQAYAALGARYVRTGPWAAYNFTGGGLV* | |
| Aquabacter spiritensis | MSGLLVFAIVPADRIEPGLLAPAEGLPPGLETVVAAGFAAIVGTAPEGGLKGRDRG | 244 |
| strain DSM | SLLPWLLASQKVIERLMARGPVLPAALGSVLEDESRVRHMLVCGQAALAAAFETL | |
| 9035_gvpFL1 | NGCWQTDLSVRWDLSRTVAHLMTELPPGLRAAAETGDETARRSLGAALAGLVA | |
| | GERRRIQSRIGAVLGAVARDLIVSDPVEPEGVVGVALLVDAPASAQVDAALDRLD | |
| | GEFEGRLTFRLVGPLAPYSFATVQIHLGPAAGLAGAHAELGLEAGAPLEAVKAAYH | |
| | RLIVGLHPDLVPHGSPGDDADDAASGKGGRAARFAAVTAAYRTLQAEHAPVSLR | |
| | RQDGLSPG* | |
| Aquabacter spiritensis | MLYVYAITADHPGPHDAGSLPGEGIVPGAPVRLLPFGDLAAAVSPVSAVDFGPEA | 245 |
| strain DSM | LPARLQDVDWTGQRVLAHQRVVDSLVDVATVLPMKFCTLFSGAAALRAALADN | |
| 9035_gvpFL2 | RAALEATVVRLRGAREWGVKLFWEAPPAEPAPVERGPGAGAAFFQRKRDAQRL | |
| | RAEAEAALAHGVAESHRRLAARARAAVANPVQPAAVHRRRGEMALNGAYLVPR | |
| | ADEAAWRESLAELERTYAGAGIRYELTGPWGPYNFTGGGLAGS* | |
| Bradyrhizobium | MTMNLVGITTPDVAGAIAAAGGRLADVETRAVEAGGLVALLALSKAPFWHVLRR | 246 |
| oligotrophicum | SRTALRSMLTAQRILEAAAVYGPLLPARPGTLIRNDAEACMLLRSQCRHLAEGLRL | |
| S58_gvpFL1 | HGTSRQYQITISWDPVAALAARRDHQDLVEAAAASADGAADKAASMIQRFMSD | |
| | QQARFEAEAMRALAAVAEDVITLPVNQPDMLMNAVVLLAPGAEPELERVLEALD | |
| | RGLRGKNLIRLIGPLPPVSFAAVSIERPGRQRIAAARRLLGIGEATRTCDLRRAYLDK | |
| | AHAHHPDTGGHAADASIVGAAAEAFRLLARVAEARASAGQDDVILVDIRRQDQQ | |
| | RSLST* | |
| Bradyrhizobium | MSKANLGIGLVHGVVTAQSAALLPQIVDAFDATEIIVVNTEQQALLISDIPQYLRGH | 247 |
| oligotrophicum | VEADTLFSDPARISTLAMKHHRILQAAAVVTDVVPVRLGTLVRGPSGARDLLNREA | |
| S58_gvpFL2 | VRFAGHLVTIHNALEFSVRILPTEQPSRRVARPVPSSGRDYLRIRRDERCGQRPAVV | |
| | DITLQELASRAVAIRERQSASRSGGRTPALAEAAFLVDRHALAAFDDCAGRIERQIA | |
| | ENGLALDIFGPWPAYSFVDGARENLG* | |
| Bradyrhizobium | MSSPRLIGLLAADDVPADLADQIMSCGPVAAAIRFAPAAASSSESLDHHAAVVAW | 248 |
| oligotrophicum | CRRAAFLPSRAGIPISPELLQSIARSAWYHRSTIEHIEGRVEISVELERRDGVRDGGID | |
| S58_gvpFL3 | GGGRAYLRATAHDLRACEVGVATAANLLAMYSERADADLIARTAPLPAIRLRASVL | |
| | VRRAVAPRLARQFDSMLSAISDRLVCRVTGPWPPYSFSTIREPS* | |
| Burkholderia | MVWLTYAVLTPKRSITLPPGVAGARLEIVDGAHLRTIVSEHPRAPSATIPSALDFGQ | 249 |
| thailandensis sp. | TVAALFRHGAIVPMRFPTCLDSKQAVRDWLDDESDMYRDLLQRIDGCVEMGLRF | |
| Bp5365 strain | RLPEAPRAQPRPQAGGPGHAYLAARGAPNSVARSHGERIAAVLRNLYRDWRFDG | |
| MSMB43_gvpFL | LVEGFVSLSFLVRQTTLDDFVDRCRQAARETAFPLYMSGPWPPYSFATDERSSAPE | |
| | PHRALRLMRRPSTAVSISANVAAPEKKDSAR* | |
| Desulfobacterium | MTLHLLYCVFSSGEMEKTRKLVPPGIDGEPVHEICSNKISGVVSTLGKPPDTHVKSL | 250 |
| vacuolatum-DSM | LAYHGVIDSYHQNRTVIPMRFAAVFRTYAHMITALNNNEKSYLLQLKRLHDCTEM | |
| 3385_gvpFL | CVRFISNSPCCVKKKEPAISPKKISGTTFLQQRKAMYEQQNRLPPEIHEKTRDILQHF | |
| | RGLYMEFKQESQPLEKDCPSLSLQGAEKTDGNALLISLFFLISKKNISLFRSRFQNICG | |
| | SSSGRHMMNGPWPPFNFINTESNLTDPS* | |
| Desulfomonile tiedjei | MLGSLAAIQFLSISSYGADEMKFLMYCIFTENSIEPPHSLVGVNRSPVRIISCDGLAA | 251 |
| DSM 6799_gvpFL | AVSVITQKEIPRDPATGLDYHKVIQWFHERIGVIPLRLGTCLGHESDVVQLLHSHGA | |
| | RYKSLLKELDGCVEMGIRVIHDRPGPQELASKSPFISRFNGTESGTDYLMRRKVLFD | |
| | ADEFAISRNREIVERYHSPFTGLYVSFKAQTSKFSPLGTDRNSVLTSLYFLIPRQSADS | |
| | FRAIYGDLRSGLHERIMLSGPWPPYNFVLPEDCL* | |
| Enhydrobacter | MEGHRIYIYGIVRDAADGGPAPVPPVAGLDGGALRAIAGYGLAAIASAVDLSKAGI | 252 |
| aerosaccus strain | PFEEQLKDPDRATALVLEHHRVLQQAIDAQTVLPMRFGALFQDDRGVTDALEKN | |
| ATCC 27094_gvpFL | RCGLMDALGRIDGAREWGVKIFCDRAVAARQLSATSAVVQAAEKELSGLAEGRA | |
| | FFLRRRLERLRTEETDRAVAHEVDVSRQALCELARASAPLKLQPAAVHGRGEDMV | |
| | WNGAFLVPRSGEERFLSRLEVVVQSRSDLGLHYEVTGPWPPFSFVDGQLEGGGD | |
| | ACPDGA* | |
| Octadecabacter | MRSATSIVYAYGVLTNCSDIALDMPRSDLAGLVKNGPLRILPFGNIAAVVCDFVLP | 253 |
| antarcticus 307_gvpFL | NGSDLETLLEDSRSAERLILNHHQVLSYIVSQHTILPLRFGAAFTEDAGVIAALGGRC | |
| | SELQKALGRIDGALEWGVKTFCDRKLLKQRVRGTGSEISDLESEIAKQGEGKAFFLR | |
| | RRKERLILEEVEEILEQCVVGTQEQLEPSVIEEALVKLQPPTVHGHEHDMLSNISYLI | |
| | ARGTEDAFMQSLEDLRLAHAPYGLEYQMNGPWPAYSFSDQQLEGGVNDQ* | |
| Octadecabacter | MSSATSIVYVYGVLTNCSDLVLDFPPGDLAGIVESGPLRILPFGDIGALVCDFILPDG | 254 |
| arcticus 238_gvpFL | SDLKTILEDSRSAERMILNHHLVLADMVSRYTILPLRFGAVFAEDAGVIAALGGRYS | |
| | TLQKELDRIDGAIEWGVKSFCNRKMFSECVAETVSEISVLEKEIADQGEGKAFFLRR | |
| | RIQRLILDEVEKTLEQCLVGAQDQLKSRAIEETLVKLQPPTVHGHKHEMVSNRSYLI | |
| | ARGAEDAFMQSLDDLRVVYAPFGFDYQINGPWPAYSFSDQQLGGGVNDK* | |
| Rhodobacter | MGHYLYGLLAPPARGTLAQMQAAAAGVTSLGGPVALSAVEGMLLVHCPCDLAEI | 255 |
| capsulatus SB | SQTRRNMLAHTRMLEALMPLATCLPVRFGVIAQDLAEVARMIHERRAELVGHAQ | |
| 1003_gvpFL1 | RLLDPVEIGLRVRFPRDRALAQLMAETPDFVAERDRLMGQGAGAHFARADFGRR | |
| | LAEALDARRTRDQKRLLAALRPHVRDHVLRAPEEDVEVLRAEFLIPAAGVDAFSRIA | |
| | HDLAAALGFAGAAEPELQVIGPAPPYHFLSLSLAFDNTSEAA* | |
| Rhodobacter | MAHEIIAILPCEAAQLPSGLTGVVGRGATAVLAPAPGWAERLTGGPKQTAVRHHS | 256 |
| capsulatus SB | RLEALMAMGSVLPFAAGIACTPEEAALLLRLDAPLIARLAAEIGPRRHFQLALDWD | |
| 1003_gvpFL2 | ESRVLAAFRDSPELAPLFSGAAVTPEALRQAITALADRLSATALRLLDPVAEDPVEQ | |
| | PRAPGCLLNLVFLLRPEDEPRLDAALQAIDALWSEGLRLRLIGPSAPISHALVDIDRA | |
| | DVAALAAAADLLKVAPEAGPEAVTEAAKAALRSPDLAANAAEQIRAAARLLLRAG | |
| | DIAALGLSGAATLPHLVHLRPGGRKSGLTSSGEAA* | |
| Rhodobacter | MTGLALHGFVSPDGWSAAAAPPARCAVVLGGVAALVSEAGDALDTPETAQAAA | 257 |
| capsulatus SB | LAHHALISAWHRRGPVLPVRLGTVFSSQAALQTALAPKAAQLRAALDALADKEEM | |
| 1003_gvpFL3 | VLTIVPAARPPDLPPPAATGADWLRARKAVRDRGQARQTDRQQTLAGLQDALR | |
| | AQGVASLAAPAPREGGSRWHLLIARDDGAGLDRWLAAQADRFDAAGLDLTLDG | |
| | PWPPYRFAAEILEALDG* | |
| Rhodobacter | MSEPRISGLAPWRADLPDVIGCHGGWVLMGAAADETPEARLRRQVGWCRAAV | 258 |
| capsulatus SB | DVLPLSPRLAPTRAEAERLVATRGPDLERAHRHIRGRLQVIVQLEMCRTDLGLVRR | |
| 1003_gvpFL4 | EISGGRSWLQDRAERATREARANADFEAQVRRVVRALFPREGQVVTLAPSGTAG | |
| | QLRLRRAVLVPRAGLQAFAAALSADLDRDGRGGLWDVIAPLPPLAFAALEAGPGG | |
| | AVT* | |
| Rhodobacter | MIYLYGLLEEPASGHEVLAGMAGVTGPIALARLPGGILIYSSATEADILPRRRLLLAH | 259 |
| sphaeroides | TRVLEAAAWFGNLLPMRFGMMASTLAEVAAMLASRLTELCAAFDRVRGRVELGL | |
| 2.4.1_gvpFL1 | RLSFPREPALAATLATAPDLAAERARLLALRRPDPMAQAEFGRRLAERLDARRGET | |
| | QRLLFQSLRPLWVDHRLRVPDSDVQVIAVDVLVEDGAQDRLAAALVKAAADCSF | |
| | APTAEPSVRVIGPVPLFNFVDLVLSPRREEVA* | |
| Rhodobacter | MRLREVVAVLEGHPPSVLPEGTEAICEAGLTAILGMPPGLLSGRRALLEHAACRQA | 260 |
| sphaeroides | VLERLMAFGTVLPVLTGNCLTPAEAAAALAANSPRLRQELRRLAGRVQFQVLVQ | |
| 2.4.1_gvpFL2 | WHAALVPKRTDPDETAEDLRLRFTHRIADALARVAERHVNLPLREDMLANQALLL | |
| | LQTRTDDLDRSLEQIDALWTEGLRIRRIGPSPPVSFASLNFRRVSSAAIRRARHRFDL | |
| | EGPVDPIRLRALRRDLLLRASEAERAEILAAAAVLDLLTRCAASGGDLHLVRIWSEG | |
| | QAVPSDLEDAA* | |
| Rhodobacter | MSGLLLLGVVSGLGISPAITSPHLRLDGDGYAAILLSLDRLPPDPASPDWAVQAALA | 261 |
| sphaeroides | QNAILSAYAATEDVLPVALGAAFTGIAAVKRHLDAERATLDAGMERLAGRAEYVA | |
| 2.4.1_gvpFL3 | QLIAEQVADGAAPAPASGSAFLKARSARHEQRRHLARERTGFARATAEELASLSCS | |
| | ASARPLKPDGPLLDLSLLVARDRVPGLLEAAEASSRAGSRLALSVRLIGPCAPFSFLP | |
| | ETRGHD* | |
| Rhodobacter | MAGDARSRVRLHLAAMRDCETFLPFPPAATIAVDEAIAWCGRRTNALAEEIDRFS | 262 |
| sphaeroides | RQRQLTVSARLIAPLLPDAAASGAGWLRARRDASAHQARLRTVLMQIMSLLGEV | |
| 2.4.1_gvpFL4 | RCIPGRLQDEVQVNLLVPAAETHPVLHELRERLRVGDALWSACTVTGPWPPYAFI | |
| | SWETA* | |
| Rhodococcus hoagii | MSEQESAPDGGGPVVYVYGLVPADVEVKEDATGIGSPPRPLKIVHHEDVAALVSEI | 263 |
| 103S_gvpFL1 | DPDTPLGSSDDLRAHAAVLDSTATVAPVLPLRFGAVLTDTDAVVAELLEPYRDEFH | |
| | EALEQLEGKVEFVVKGKYVEDAILREILADDPEAARLRDVVREQPEDTTRDERLALG | |
| | ERISQALTAKREQDTGRIVEALQPAATAVAPREPTDDEEAGSVAVLISADGVDELD | |
| | KAVARLIDDWQGRVEVTVTGPLAAYDFVKTRAPGT* | |
| Rhodococcus hoagii | MTPDDGVWVYAVTGDGSFPGGISGIRGVAGEELRTVTDSGFTAVVGTVRLDTFG | 264 |
| 103S_gvpFL2 | EEALRRNLEDLDWLADTARRHDAVVAAICAGGATVPLRLATVYFDDDRVRTMLR | |
| | DNAEQLGEALQQIADRSEWGVRAYLERPRSEPRDAREKTGRPSGTAYLMQRRAQ | |
| | VAAREQAESAAGRRADEIFAELARWAVAGVRQPPSPPDLAGRRSQEILNTSFLVD | |
| | NGRHREFVTAVEELDARLSDVDLVLTGPWPPYSFTSVEASAR* | |
| Serratia sp. ATCC | MSLLLYGIVAEDTQLALEPDGSPHAGEEPMQLVKAATLAALVKPCEADVSREPAA | 265 |
| 39006_gvpFL | ALAFGQQIMHVHQQTTIIPIRYGCVLADEDAVTQHLLNHEAHYQTQLVELENCDE | |
| | MGIRLSLASAEDNAVTTPQASGLDYLRSRKLAYAVPEHAERQAALLNNAFTGLYRR | |
| | HCAEISMFNGQRTYLLSYLVPRTGLQAFRDQFNTLANNMTDIGVISGPWPPYNFA | |
| | S* | |
| Stella vacuolata-ATCC- | MSGLLVFAIVPADGIEPGILAPREELPANLRAVAADGFAAVVGAAPEGGLKGRDRS | 266 |
| 43931_gvpFL1 | VLLPRLLASQKVIERLMARGPVLPVTLGTVLEDEARVRHMLAAGAPMLEAAFGTL | |
| | GDCWQMDLSVRWDLNQVVARLMGEVPGDVRAAAGSGDEAARRALGEALAGL | |
| | AAGERRRVQSRLAAALRDVARDLIVSEPVEPESVVDIAILVERPALAEVEAALDRLD | |
| | AEFEGRLKFRLVGPLAPHSFATVQVHLAPEAALAGACAELGVERGAGLQDVKVAY | |
| | HRALVRFHPDLAPHGDDGGPEDEHDGGEGRASRLLTVTAAYRALQAEHAPISLRR | |
| | QDGIAVNQEQDASAAMGQQRGIVPGRELQALRM* | |
| Stella vacuolata-ATCC- | MLYVYAIAADHPDPDNAMFGGEGIVPDAPVRLLQLGDLAVAASLVSAADFAADA | 267 |
| 43931_gvpFL2 | LRAHLEDARWTALRVLAHQRVVDSLLPHATVLPMKFCTLFSGEAALKQALAHNRA | |
| | ALQATVERLRGAREWGVKLYWEAPRNPAPPSAGQGEAGAGAAFFQRKRDQQR | |
| | QRAEAEAAVARCVAASHRRLADAARAAVANPVQPPAVHRQPGEMALNGAYLV | |
| | ARAAEPAWREVLAELERTHADGGIRYELTGPWGPYNFTGSGLVGS* | |
| Thiocapsa rosea strain | MSDRPRPMLHCILRSPPGSIARAEAGLRWIERDGLAALVADREPSEIAGASSVGLQ | 268 |
| DSM 235 Ga0242571- | RYADIVAEIHACAAVIPVRFGCLLAGDEAVGKLLHRSRDRLHGLLDQVGDCLEFGIR | |
| 11_gvpFL | LLLPADAPAATDDDAAPRLHANAPSDPRADPDMGPGLSHLLAIRHRLDVEASLAA | |
| | RAREAREVIKGRVAGRFREVREELGQIDGRSLLSLYFLVPREQGEHFVECLRQDASS | |
| | LRGTGLLTGPWPPYNFVGAIDDDIRSLD* | |
| gvpG | | |
| Anabaena-flos- | MLTKLLLLPIMGPLNGVVWIAEQIQERTNTEFDAQENLHKQLLSLQLSFDIGEIGEE | 269 |
| aquae_gvpG | EFEIQEEEILLKIQALEEEARLELEAEQEEARLELEAEQEDFEYPPQFTAEVNKDQHL | |
| | VLLP* | |
| Bacillus- | VLHKLVTAPINLVVKIGEKVQEEADKQLYDLPTIQQKLIQLQMMFELGEIPEEAFQE | 270 |
| megaterium_gvpG | KEDELLMRYEIAKRREIEQWEELTQKRNEES* | |
| Ancylobacter | MGMLTDVVFAPAVGPLKGVLWLARIIAEQAERTLYDEGVIRAALLDLEQQLEAGEI | 271 |
| aquaticus strain | DEDAYETQETVLLERLKIARERMRSGL* | |
| UV5_gvpG | | |
| Aphanizomenon flos- | MLTKLLLLPIMGPLNGLVWIGEQIQERTNTEFDAQENLHKQLLNLQLSFDIGEISEE | 272 |
| aquae NIES-81_gvpG | DFEIQEEELLLKIQALEEEARLELELAEEEARLELELEQEEEEDFVVKPQLTTEIDRDKD | |
| | LVLLP* | |
| Aphanothece | MVFKLLLLPITGPIEGVTWLGEQILERANQELDEKENLNKRLLSLQLSLDLGEISEEEY | 273 |
| halophytica (strain | DEQEEEILLAMQAMEDEENNQAEEETD* | |
| PCC 7418)_gvpG | | |
| Aquabacter spiritensis | MSLVTDVLFAPAVGPLKGVLWLARLIAEQAERTLYDEDVLRAALLDLEQRFEAGEI | 274 |
| strain DSM 9035_gvpG | SEADYETEEDILLARLKIARERMRSGL* | |
| Bradyrhizobium | MLFQILTSPVSGPFRMVSWIGGAIRDAVDTKMNDPAEIKRALAALEQQLEAGSLS | 275 |
| oligotrophicum | EQDYERMEMELIERLQSSLRHGSGNGG* | |
| S58_gvpG | | |
| Burkholderia | MFILDNLLAAPIKGMFWIFEEIAQAAEEETIADIEMIKAALVELYRELESGQIDETEF | 276 |
| thailandensis sp. | ETRERALLDRLDSLETS* | |
| Bp5365 strain | | |
| MSM B43_gvpG | | |
| Chlorobium luteolum | MFILDDILLAPLSGMVFLGRKINEIVQNEMSDEGAVKEQLMKLQFRFEMDELSEEE | 277 |
| DSM 273_gvpG | YDRLEDELLSTLAEIRAQKENR* | |
| Dactylococcopsis | MVFKLLLLPITGPIEGITWLGEQILERADQELDSKENLNKRLLSLQLSLDLGEISEEEY | 278 |
| salina PCC 8305_gvpG | DEQEEEILLAMQAMEDEENEEEES* | |
| Desulfobacterium | MFLVDDILFFPAKSLVWVFRELHNAVQQEKTNESDALTTELSELYMMLETGKITEE | 279 |
| vacuolatum_DSM | EFDEREEQILDRLDEIQERDQ* | |
| 3385_gvpG | | |
| Desulfomonile tiedjei | MERYTMFLLDDILFLPMNGVLWICNEIHDAAEQELHNESDAITAQLQKLYTLLEAG | 280 |
| DSM 6799_gvp | GDIGESEFDVLEAELLDRLDAIQERGALLEA* | |
| Desulfotomaculum | MLGKLLLSPILGPVMGVKFIAEKIKQQADQELYDKSKIKQDLMELQIKLELEEITEEY | 281 |
| acetoxidans_DSM | YLQREEELLVRLDELASMETEEEEV* | |
| 771_gvpG | | |
| Dolichospermum | MLTQLLLLPIMGPLNGVVWIAEQIQERTNTEFDAQENLHKQLLSLQLSFDIGEISEE | 282 |
| circinale_gvpG | EFEIQEEEILLKIQALEEEARLELEAEQEEARLELEAEQEQARLELEAEQEELENQPQL | |
| | TPKIDTYRHLVKL* | |
| Enhydrobacter | MGMLARLLTLPVSAPVGGVLWIARKIEEEANAERWDRNKITGALSELELELDLGAI | 283 |
| aerosaccus strain | DVEEYDAREAVLLQKLKELQEVEND* | |
| ATCC 27094_gvpG | | |
| Isosphaera | MFLVDDILLAPAHSLMFLLREIHQAALEELRRDAQKVREELAECYRALETGALTDEE | 284 |
| pallida_ATCC- | FASLETDLLDRLDALEELARFNSDEDDDPEDEDWDVEDDDPAEAVW* | |
| 43644_gvpG | | |
| Legionella drancourtii | MLLLGSILMAPVHGLMAIFEKIKEAVDEEKQHDIERIKSELMALYTKLESGELSEADF | 285 |
| LLAP12_gvpG | EKQEKILLDKLDSLEDEDD* | |
| Microcystis aeruginosa | MFLDLLFLPVTGPIGGLIWIGEKIQERADIEYDEAENLHKLLLSLQLSYDMGNISEEE | 286 |
| NIES-843_gvpG | FEIQEEELLLKIQALEEEEAENESESSL* | |
| Nostoc punctiforme | MVLRFLLLPITGPLMGVTWLGEKILEQASTEIDDKENLSKQLLALQLAFDMGEIPEE | 287 |
| ATCC 29133_gvpG | EFEIQEEALLLAILEAEQEERDQTQEY* | |
| Nostoc sp. PCC | MLGKILLLPVMGPINGLMWIGEQIQERTNTEFDAQENLHKQLLSLQLKFDMGEIS | 288 |
| 7120_gvpG | EEEFDIQEEEILLKIQALEAEERLNAESEEDDDLDVQPIFILASEENPVYQDQSRFSEE | |
| | YEDKEDLVLSP* | |
| Octadecabacter | MGIILNTLMSPLIGPMKGVFWVAEQIKDQTDAEIYDDSKILVELSELELLLDLEKIEL | 289 |
| antarcticus 307_gvpG | KDFEAKEDVLLKRLQEIRKAKKNDSV* | |
| Octadecabacter | MSIILNTLMGPLIGPMKGLLWVAEQIKDQADAELYDDSKILVALSELELSFDLEQIEL | 290 |
| arcticus 238_gvpG | KEFEAQEDVLLQRLQAIRKAKQNDTD* | |
| Pelodictyon | MFILDDILFAPLNGLIFIAKKINDVVEKETSDEGVVKERLMALQLRFELDEIDEVEYD | 291 |
| phaeoclathratiforme_ | REEDELLQKLERIRLNKQNQ* | |
| gvpG | | |
| Phormidium tenue | MLFKLLFAPVLGPIEGISWVANKLLEQADVPTNDLESLQKQLLALQLAFDMGEVAE | 292 |
| NIES-30_gvpG | ADFEIQEEEILLAIQAIEDEEDEDE* | |
| Planktothrix agardhii | MILRLLLSPITAPFEGVIWIGEQLLERAEAELDDKENLGKRLLALQLAFDMGDIPEED | 293 |
| str. 7805_gvpG | FEVQEEELLLQIQALEDEANQENDEID* | |
| Psychromonas | MFILDDILLAPYSGIKWLFKEIQRQAQEELDGEADRITTDLTNLYRQFESNEITEQEF | 294 |
| ingrahamii 37_gvpG | EERETVLLDRLDELQEESNLLDEEYDEEYEDDDEEYEDDDEEYEDDDEEYEDDDEEY | |
| | EDDDKNDKDKNDDHDNDDDDENKDENDKYNDEER* | |
| Rhodobacter | MGLLRKLLLAPVELPITGALWIVEKIAETAESELTDPGTVRRLLRGLEQQLEAGEITE | 295 |
| capsulatus SB | EEYEFAEEILLDRLKRGQAAEARSGGP* | |
| 1003_gvpG | | |
| Rhodobacter | MGLLTSLLTLPFRGPFDGTLWIAARIGEAAEQSWNDPAALRAALVEAERQLLAGEL | 296 |
| sphaeroides | SEETYDAIELDLLERLKGTAR* | |
| 2.4.1_gvpG | | |
| Rhodococcus hoagii | MGLFSAIFGLPLAPVRGVVWIGEVVRRQVEEETTSPAAMRRDLEAIEEGRRSGEIS | 297 |
| 1035_gvpG | EDEAAQAEDEILHRVTRRRDAGASGEE* | |
| Serratia sp. ATCC | MLLIDDILFSPVKGVMWIFRQIHELAEDELAGEADRIRESLTDLYMLLETGQITEDE | 298 |
| 39006_gvpG | FEQQEAVLLDRLDALDEEDDMLGDEPGDDEDDEYEEDDDEEDDDEEDDDDEDD | |
| | DDEDDDDEEDDDDDEDDDDEDEPEGTTK* | |
| Stella vacuolata_ATCC- | MGLVTNVAFAPVVGPLKGVLWLARLIADQAERTLYDEDLVRAALLDLEQRLDAG | 299 |
| 43931_gvpG | QISEADYDAEEEILLARLKIARERMRSGL* | |
| Thiocapsa rosea strain | MLIVDDLLAAPFKGIIWVFEEIHKSATAEQRARRDEIMAALSALYRALEQGEITDDT | 300 |
| DSM 235 | FDTREQALLDELDALDAREDANELGSDEDEDDLDGAGEDAS* | |
| Ga0242571_11_gvpG | | |
| Tolypothrix sp. PCC | MEVMIMLGKILLFPVMGPISGLMWIGEQIQERTDTEFDAQENLHKQLLSLQLSFDI | 301 |
| 7601_gvpG | GEISEEDFEEQEEELLLKIQALEEEKARLEAESIEDEEDEVEPTYFIAEVEEDKVLAEAF | |
| | RGNKKYEDNENLVLSP* | |
| Trichodesmium | MLLRLLTLPISGPLEGVTWLGKKLQEQVDTEIDETENLSKKLLTLQLAFDMGEISEE | 302 |
| erythraeum | DFEDQEEELLLAIQALEEQKLKEEEEDA* | |
| IMS101_gvpG | | |
| gvpJ | | |
| Anabaena-flos- | MLPTRPQTNSSRTINTSTQGSTLADILERVLDKGIVIAGDISISIASTELVHIRIRLLISS | 303 |
| aquae_gvpi | VDKAKEMGINWWESDPYLSTKAQRLVEENQQLQHRLESLEAKLNSLTSSSVKEEIP | |
| | LAADVKDDLYQTSAKIPSPVDTPIEVLDFQAQSSGGTPPYVNTSMEILDFQAQTSA | |
| | ESSSPVGSTVEILDFQAQTSEESSSPVVSTVEILDFQAQTSEESSSPVGSTVEILDFQA | |
| | QTSEEIPSSVDPAIDV* | |
| Bacillus- | MAVEHNMQSSTIVDVLEKILDKGVVIAGDITVGIADVELLTIKIRLIVASVDKAKEIG | 304 |
| megaterium_gvpi | MDWWENDPYLSSKGANNKALEEENKMLHERLKTLEEKIETKR* | |
| Ancylobacter | MNEQRMEHSLQAVGLADILERVLDKGIVIAGDITISLVEVELLNIRLRLVVASVDRA | 305 |
| aquaticus strain | MSMGINWWQSDPHLNSHARELAEENKLLRERLDRLEAAVVPSALPADAALEPSL | |
| UV5_gvpJ1 | AGEDARHGG* | |
| Ancylobacter | MPSRHSGEIAVADLLDRALHKGLVVWGEATISVAGVDLVYLGLKLLLTSTDTVNR | 306 |
| aquaticus strain | MREAANAPPDERHLHAD* | |
| UV5_gvpJ2 | | |
| Aphanizomenon flos- | VTSTPILPTRPQTNSSRAINTSTQGSTLADILERVLDKGIVIAGDISISIASTELIHIRIRL | 307 |
| aquae NIES-81_gvpJ | LIASVDKAKEMGINWWETDPYLSTKAQRLVEENQQLQNRLENLESQINLLTSAKV | |
| | QEQISLVETTEDNTHQTTEDNTHQTHEESIPLPIDSQLDV* | |
| Aphanothece | MVNPNTNKPKSYQSKGITNSTQSSSLADILERVLDKGIVIAGDITVSVGSTELLSIRIR | 308 |
| halophytica (strain | LLVSSVDKARELGINWWEGDPYLSSQANLLKEENQALQNRLENMEAELRRLKGET | |
| PCC 7418)_gvpJ | NPEPSFLSESEDNS* | |
| Aquabacter spiritensis | MSEQRMEHSLQAVGLADILERVLDKGIVIAGDISISLVEVDLLNIRLRLVVASVDRA | 309 |
| strain DSM | MSMGINWWQSDPHLNSHARQLEEENRLLRERLDRLEAALAPPEGGMLRAEVEV | |
| 9035_gvpJ1 | AHGG* | |
| Aquabacter spiritensis | MPDPEPIIPRTSGDVALADLLDRALHKGLVLWGEATISVAGVDLVYLGLKVLLASTD | 310 |
| strain DSM | TANRMRDAAAASAAGSHLPGG* | |
| 9035_gvpJ2 | | |
| Arthrospira platensis | MTLQSRSSSPQRGVPMSTSGSSLADILERVLDKGIVIAGDISVSVGSTELLSIRIRLLI | 311 |
| NIES-39_gvpJ | ASVDKAKEIGINWWESDPYLSSQAQQLSQSNQQLLEEVKRLQEEVRSLKALTSQSS | |
| | QPVTPPNSENDD* | |
| Bradyrhizobium | MTFTVHQPTGGDRLADILERVLDKGIVVAGDVTISLVGIELLNIKIRLIVATVDRALE | 312 |
| oligotrophicum | LGINWWEADPRLTTRASELSVENEELKKRLALLEADAGRNQRPRKRRVRSIAATSG | |
| S58_gvpJ1 | ASHER* | |
| Bradyrhizobium | MTYRADLDYLEPAASSEGSLLELLDHLLDRGVLLWGELRISVADVELIEVGLKLMLA | 313 |
| oligotrophicum | SARTADRWRQTTTQRASIAPGDCP* | |
| S58_gvpJ2 | | |
| Burkholderia | MRSADGEPVSAELAQRLSLCESLDRILNKGAVISAQVVVSVADVDLLYLHLRLLLTS | 314 |
| thailandensis sp. | VETALVGRAMPREEASR* | |
| Bp5365 strain | | |
| MSMB43_gvpJ1 | | |
| Burkholderia | MADLLERVLDKGVVITGDIRINLVDVELLTIRIRLLVCSVDKAKELGIDWWNADTFF | 315 |
| thailandensis sp. | LGPDRGQSALPGRASAVDVAAGSAVHADAAHR* | |
| Bp5365 strain | | |
| MSMB43_gvpJ2 | | |
| Chlorobium luteolum | MPELKHAVNATGLADILERVLDKGIVIAGDIKIQIADIDLLTIKIRLMVASVDKAIEM | 316 |
| DSM 273_gvpJ1 | GINWWQEDPYLSTGAKTSEQTRLLGEINQRIEKLESINR* | |
| Chlorobium luteolum | MQEDLYTANRQVTLLDILDRVLNKGVVISGDIIISVAGIDLVYVGLRVLLSSVETMER | 317 |
| DSM 273_gvpJ2 | LDAARAEGLQQ* | |
| Chlorobium luteolum | MAVEKTIGSSSLVEVIDRILDKGVVVDAWVRVSLVGIELLAIEARVVVASVETYLKY | 318 |
| DSM 273_gvpJ3 | AEAIGLTAKAA* | |
| Chlorobium luteolum | MAVEKTIGSSSLVEVIDRILDKGVVVDAWVRVSLVGIELLAIEARVVVASVETYLKY | 319 |
| DSM 273_gvpJ4 | AEAIGLTAKAA* | |
| Dactylococcopsis | MVNSNTNQPKSYQSKGITNSTQSSSLADILERVLDKGIVIAGDISVSVGSTELLTIRIR | 320 |
| salina PCC 8305_gvpJ | LLISSVDRAREIGINWWESDPYLSSQAHLMKEENQALQSRLENMEAELRRLKGET | |
| | NLDQSSLGESDQRSLQ* | |
| Desulfobacterium | MAYIDIDNDASKQISICEALDRVLNKGAVITGELTISVADIDLIYLSLQAVLTSVETAR | 321 |
| vacuolatum_DSM | HMFDSQINDAVKEVK* | |
| 3385_gvpJ1 | | |
| Desulfobacterium | MPIQRTAQHSIESTNIADLLERVLDKGIVIAGDIKISLVDIELLSIQLRLVICSVDKAKE | 322 |
| vacuolatum_DSM | MGMDWWVNNPVFMPNKGTQNDEIADTLTKINSRLEHLEKATISGS* | |
| 3385_gvpJ2 | | |
| Desulfomonile tiedjei | MMDEEEHVSLCEALDRVLNKGAVIAGEVTISVANVDLIYLGLQVVLASVDTIRGKR | 323 |
| DSM 6799_gvpJ1 | NELLRHDVGLHLTADNA* | |
| Desulfomonile tiedjei | MSIQASTRHSIQSTNLADLLERVLDKGVVIAGDIKIKLVDVELLTIQIRLVVCSVDKAK | 324 |
| DSM 6799_gvpJ2 | EMGMDWWTNNPAFQPALAQISE* | |
| Desulfotomaculum | MGPQMGPIKSTGNLSLLDVIDRILDKGLVINADISVSIVGVELLGIKIKAAVASFETA | 325 |
| acetoxidans_DSM | AKYGLQFPTGTEINEKVSEAAKQLKEICPECGKKSGRDELLHEGCPWCGWISARAL | |
| 771_gvpi 1 | RLETEHSQR* | |
| Desulfotomaculum | MLPIREERATLTDLLDRVLDKGLLLNADILISVAGVPLIGITLKAAIAGMETMKKYGL | 326 |
| acetoxidans_DSM | LIDWDQESRLAERRLRSSRH* | |
| 771_gvpJ2 | | |
| Enhydrobacter | MAVTNGRMEHSIQGSSLADILDRILDKGIVIAGDVTISLVGVELLNIRLRLLVASVDK | 327 |
| aerosaccus strain | AIEMGINWWEADPYLTSQTKASSEQTELLQQRLERIEGLLAGQATKEQPL* | |
| ATCC 27094_gvpJ1 | | |
| Enhydrobacter | MPVQTAHDGELALADLLDRALNKGVVLWGDATISLAGVELVYVGLRVLVASCST | 328 |
| aerosaccus strain | MEKYRSSPRKGSMPIARGES* | |
| ATCC 27094_gvpJ2 | | |
| Isosphaera | MIVCSSSTPERIGPPMNLPPPHHAPWCYDSPDLETLPLDPAERIALCEVLDRVLNK | 329 |
| pallida_ATCC- | GVVIHGEITISVAGVDLVYLGLNLLLTSVETAQSWKFRGMIE* | |
| 43644_gvpJ1 | | |
| Isosphaera | MAITRSSRPDVTHSTSGATLADVLERVLDKGLVIAGDIKIKLVDVELLTIQIRLVVASV | 330 |
| pallida_ATCC- | DKAREMGLDWWTRSPELSSLAATTCPALTPPKQEATPPATRIQAPTESAQTTPDQ | |
| 43644_gvpJ2 | SHPSDPSASNIDEVAELRRHIELMQLRDEARQRAHREELAALRAQLTRLTELLDSPR | |
| | * | |
| Legionella drancourtii | MIIEDKPVSLCETLDRVLNKGVVVAGTVTISVADVDLLYLDLHCLLSSMKGMNLIGS | 331 |
| LLAP12_gvpJ1 | ERER* | |
| Legionella drancourtii | MELQKSPTHSIGSTTIADLLERILDKGIVIAGDIKVNLVQVELLTIQIRLLICSVDKAKEI | 332 |
| LLAP12_gvpJ2 | GMDWWTHQNDVQSKNGSMPIQEYVTQMEERLKNLENTLASSKNAI* | |
| Lyngbya confervoides | MTGQSLSRSSSANRQMATATQGSTLVDVLERVLDKGIVIAGDISVSVGSTELLTIRI | 333 |
| BDU141951_gvpJ | RLLVASVDKAREMGINWWENDPYLSARSQELLTANEQLQSRIESLEQELKSLRSQE | |
| | D* | |
| Microcystis aeruginosa | MTSSTFAGSLRNQSNNSLKTATQGSSLADILERVLDKGIVIAGDISVSIASTELINIRIR | 334 |
| NI ES-843_gvpJ | LLIASVDKAREMGINWWEGDPYLHSQSQALLAENRELSLRLQTLETELETLKSLTQL | |
| | SAMESHDTSPNDEAHSSDA* | |
| Nostoc punctiforme | MSTNTNRGAITTSTQGSTLADILERVLDKGIVIAGDISISVGSTELLNIRIRLLISSVDK | 335 |
| ATCC 29133_gvpJ | AKEIGINWWESDPYLNSQTRTLLATNQQLQERLASLETELQSLKALNPINHQNAG | |
| | D* | |
| Nostoc sp. PCC | MTTTPIHPTRPQTNSNRVIPTSTQGSTLADILERVLDKGIVIAGDISISIASTELIHIRIR | 336 |
| 7120_gvpJ | LLISSVDKAREMGINWWENDPYLSSKSQRLVEENQQLQQRLESLETQLRLLTSAAK | |
| | EETTLTANNPEDLQPMYEVNSQEGDNSQLEA* | |
| Octadecabacter | MNDGKMEHSLNATNLADILERVLDKGIVIAGDVTISLVGVELLNIKLRLLIASVDKA | 337 |
| antarcticus 307_gvpJ1 | MEMGINWWAHDPFLTAGAQAPAVADPAMLERMDRLEAALATALASNQTTPM | |
| | KGHK* | |
| Octadecabacter | MTNKAQGGQDLALADLLDRALSTGVVIWGEATISLAGVDLVYVGLKVLVASVDA | 338 |
| antarcticus 307_gvpJ2 | AERMKAASLVDRPTDRGQQI* | |
| Octadecabacter | MNNGKMEHSLDATNLADILERVLDKGIVIAGDVTISLVGVELLNIKLRLLIASVDKA | 339 |
| arcticus 238_gvpJ1 | MEMGINWWAHDPYLTAGAQAPVGVDPAMLERMDRLEAALAKALASNQTTPA | |
| | EGQSS* | |
| Octadecabacter | MTNETQGGQDLALADLLDRALSTGVVIWGEATISLAGVDLVYVGLKVLVASVDAA | 340 |
| arcticus 238_gvpJ2 | QRMKDASLVDRPTDGGQ* | |
| Pelodictyon | MPELKHAVNATGLADILERVLDKGIVIAGDIKIQIADIDLLTIKIRLLIASVDKAMEM | 341 |
| phaeoclathratiforme_ | GINWWQEDTYLSTKAKDKEQQLLRDDLQQRIEKLEALTKIT* | |
| gvpJ1 | | |
| Pelodictyon | MQDEFYSKNKEITILDVLDRVLTKGVVITGDIVISVADIDLVYVGLRLLLSSVETMEK | 342 |
| phaeoclathratiforme_ | NKQNSIKM* | |
| gvpJ2 | | |
| Phormidium tenue | MATATQGSSLVDVIERVLDKGIVIAGDISVSVGSTELLSIRIRLIISSVDKAREIGINW | 343 |
| NIES-30_gvpJ | WESDPYLSSRTNELLEANQQLQSRLETLEAELKALRSAEPVS* | |
| Planktothrix agardhii | MNSQQLPSNIQRGVPTSTQGSSLADILERVLDKGIVIAGDISVSVGSTELLNIRIRLLI | 344 |
| str. 7805_gvpJ | ASVDKAREIGINWWESDPYLSSQTKVLTESNQQLLEQVKFLQEEVKALKALLPQEN | |
| | QPNPISDPHK* | |
| Planktothrix | MNSQQRPSNIQRGVPTSTQGSSLADILERVLDKGIVIAGDISVSVGSTELLNIRIRLLI | 345 |
| rubescens_gvpJ | ASVDKAREIGINWWESDPYLSSQTKVLTESNQELLEQVKLLQEEVKALKALLPQEN | |
| | QPKEME* | |
| Psychromonas | MANVQKSTDSSGLAEVVDRILEKGIVIDAFVKVSLVGIELLSIEARVVIASVETYLKYA | 346 |
| ingrahamii 37_gvpJ1 | EAIGLTASAATPA* | |
| Psychromonas | MPMANVSINPELTAQECEKISLCDALDRIINKGVVIHGEITISVANVDLISLGVRLILS | 347 |
| ingrahamii 37_gvpJ2 | NVETREQSNTPKEEV* | |
| Psychromonas | MATGKPQSMTHSVKSTTVADLLERILDKGIVVTGDIKIKLVDVELLTVELRLVICSVD | 348 |
| ingrahamii 37_gvpJ3 | KAVEMGMDWWNNNPAFAPQAPAQEGELSSIEKRLEKIEKALVK* | |
| Rhodobacter | MGYRSASQPEGLADVLERILDKGIVIAGDVSVSLVGIELLTIRLRLLIATVDKAREMG | 349 |
| capsulatus SB | IDWWSHDPYLNGRLRPGEPAPETETETAALRDRLAQLEAQLSALGAQVGAAPAL | |
| 1003_gvpJ1 | AEPALRGLAAAGSSALCAAPEASSADVVQPVFRRYKEAP* | |
| Rhodobacter | MDDRFSLRLFGPEEVFDAPSGGLADLLDGLLGHGIVLHGDLWLTVADVELVYVGL | 350 |
| capsulatus SB | SAVLASPEALRSHE* | |
| 1003_gvpJ2 | | |
| Rhodobacter | MSFQMQSPLQQDSLADVLERILDKGIVIAGDISISLVGIELLTIRLRLLVATVDKARE | 351 |
| sphaeroides | MGINWWESDPRLCITQAPASDGSAALLDRLERIETQIGQLAAAREG* | |
| 2.4.1_gvpJ1 | | |
| Rhodobacter | MTDSAPTLQFATAEEALQSSETRLVDVVDALLSQGIAIRGELWLTIADVDLVFLGLD | 352 |
| sphaeroides | LLLANPDRLQCRVPDAA* | |
| 2.4.1_gvpJ2 | | |
| Rhodococcus hoagii | MTRSGSGANYPQQYSQGLGGAGHEPANLGDILERVLDKGIVIAGDIRVNLLDIELL | 353 |
| 103S_gvpJ | TIKLRLVIASLETAREVGIDWWEHDPWLSGNNRDLELENERLRARIEALESGERRV | |
| | ADVTDPHRAVQPAESPAAEVRDDDA* | |
| Serratia sp. ATCC | MPVNKQYQDEQQQVSLCEALDRVLNKGVVIVADITISVANIDLIYLSLQALVSSVE | 354 |
| 39006_gvpJ1 | AKNRLPGRE* | |
| Serratia sp. ATCC | MSGNKKLTHSTDSTTVADLLERLLDKGVVISGDIRIRLVEVELLTLEIRLLICSVDKAV | 355 |
| 39006_gvpJ2 | EMGLDWWSGNPAFDSRARVSSSAPAPELEERLQRLEARLEAAPSVIEETHL | |
| Stella vacuolata_ATCC- | MSGQRMEHSVQAVGLADILERVLDKGIVIAGDISISLVEVELLTIRLRLVVASVDRA | 356 |
| 43931_gvpJ1 | MSMGINWWQSDPNLNSHARQLEEDNRLLRERLDRLEAALALPEMAGERLADAG | |
| | QGGGAEQGVTHGR* | |
| Stella vacuolata_ATCC- | MSDPEPIIPRTSGDIALADLLDRALHKGLVLWGEATISVAGVDLVYLGLKVLVASTE | 357 |
| 43931_gvpJ2 | TADRMRAAAASQSADPKVRAG* | |
| Thiocapsa rosea strain | MMLAIGEHPDCPEEIQRVSLCEALDRILNKGAVVSGELTIAVANVDLLYLSLQLVITS | 358 |
| DSM 235 | VETAKREMLYVRH* | |
| Ga0242571_11_gvpJ1 | | |
| Thiocapsa rosea strain | MSVQRSTLTHSTNSTSVADLLERVLDKGIVIAGDIRIKLVDIELLTIQLRLVICSVDKA | 359 |
| DSM 235 | REMGIDWWSDNAMFKGLSSQASAASLPGTAAASGIEDRLARLESLLVKQSAAAE | |
| Ga0242571_11_gvpJ2 | TVL* | |
| Tolypothrix sp. PCC | MADILERVLDKGIVIAGDISVSIASTELLHIRIRLLISSVDKAKELGINWWENDPYLSS | 360 |
| 7601_gvpJ | KSQRLVEENQQLQQRLESLEAQLRSLTAAKINNPELFPVNAEDNGQSDEENVPLP | |
| | MNYQPND* | |
| Trichodesmium | MFIRVDFLLDKGVIVDAWVRLSLVVIELLTIEAKIVIASVEAYLKYSEAFCFNY* | 361 |
| erythraeum | | |
| IMS101_gvpJ1 | | |
| Trichodesmium | MAVEKVNSSSSLAEVIDRILDKGVVVDAWIRLSLVGIELLTIEARIVVASVETYLKYAE | 362 |
| erythraeum | AVGLTTLAAAPGEAAA* | |
| IMS101_gvpJ2 | | |
| Trichodesmium | MAVEKVNSSSSLAEVIDRILDKGVVVDAWVRLSLVGIELLTIEARIVIASVETYLKYAE | 363 |
| erythraeum | AVGLTTLAAEPAA* | |
| IMS101_gvpJ3 | | |
| Trichodesmium | MKTSANIATSASGNGLADVLERVLDKGVVIAGDISVSIASTELLNIKIRLLISSVERAK | 364 |
| erythraeum | EIGINWWESDPYFSSQNNSLVQANEKLLERVASLESEIKALRSN* | |
| IMS101_gvpJ4 | | |
| Trichodesmium | MKTSANIAKSAGGDSLADVLERVLDKGIVIAGDISVSIASTELLNIKIRLLISSVERAKE | 365 |
| erythraeum | IGINWWESDPSLSSQNNSLVQVNQKLLERVASLESEIEALKYSQ* | |
| IMS101_gvpJ5 | | |
| gvpK | | |
| Anabaena-flos- | MVCTPAENFNNSLTIASKPKNEAGLAPLLLTVLELVRQLMEAQVIRRMEEDLLSEP | 366 |
| aquae_gvpK | DLERAADSLQKLEEQILHLCEMFEVDPADLNINLGEIGTLLPSSGSYYPGQPSSRPS | |
| | VLELLDRLLNTGIVVDGEIDLGIAQIDLIHAKLRLVLTSKPI* | |
| Bacillus- | MQPVSQANGRIHLDPDQAEQGLAQLVMTVIELLRQIVERHAMRRVEGGTLTDE | 367 |
| megaterium_gvpK | QIENLGIALMNLEEKMDELKEVFGLDAEDLNIDLGPLGSLL* | |
| Ancylobacter | MTAPCTAETLENALRGRIDIDPEKVEQGLVKLVLMLVETVRQVVERQAIRRVEGG | 368 |
| aquaticus strain | TLTEEETERLGLALMRLEEKMAELRLHFGLEDGDLDLKLQLPLGEL* | |
| UV5_gvpK | | |
| Aphanizomenon flos- | MVYSPVENSNDFLNVIPVENSNEFLNTSPKKKSNSETGLAPLLLTVLELIRQLMEAQ | 369 |
| aquae NIES-81_gvpK | IIRRMEEDLLSESDLERTAESLQKLEEQILNLCQIFDIDPADLNINLGDFGSLLPASGS | |
| | YYPGETGNRPSILELLDRLLNTGIVVDGEIDIGVAQLDLIHAKLRLVLTSKPI* | |
| Aphanothece | MSADESNLSQVNLNPATSNSDAGLAPLLLTVTELIRQLMEAQVIRRMDGGLLNEE | 370 |
| halophytica (strain | ELDRAGDSLQRLEAEIIRLCEIFEIDPKDLNVDLGELGTLMPKNGGYYPGESSDDPSI | |
| PCC 7418)_gvpK | LELLDRILHKGVVIDGNLDLGIAQLSLIQARLHLVLTSQPINGK* | |
| Aquabacter spiritensis | MTGFAGGPAVTETLESVLQGRVDIDPERVEQGLVKLVLMVVETLRQVIERQAIRR | 371 |
| strain DSM 9035_gvpK | VEAGALTDEEIERLGLTLLRLEEKMAELRVQFNLSEADLSLKLRLPLGEL* | |
| Bradyrhizobium | MSASSHSEAPGLRLQLGDLDTALAAVFTDAAPNGSINLDPDKIEHDLARLVLTLIEF | 372 |
| oligotrophicum | LRRLLELQAIRRMEANELSEDEEERVGLALMRAAAQVSRLARELGVDPRELNLQLG | |
| S58_gvpK | PLGRLL* | |
| Burkholderia | MNAPHAAAVSDAAALAAALEQALAQQQAPPPRATQRFDVATASAGNGLAKLVL | 373 |
| thailandensis sp. | ALMKLLHELLERQALRRIEAGSLNDDEIERLGLALMRQAEEIERLAAQFGFTDADL | |
| Bp5365 strain | NLDLGPLGRLF* | |
| MSM B43_gvpK | | |
| Chlorobium luteolum | MHEDKVQFQASSVEEALRQLEGMKQGKESRIEANPDNVESGLARLVLTLIELLRKL | 374 |
| DSM 273_gvpK | MEKQAMRRIDGGSLDEAQIDELGETLMKLEMKMDELKKTFNLTDSDLNLNLGPL | |
| | GDLM* | |
| Dactylococcopsis | MSEEESNLSRVDLNPASSNSDAGLAPLLLTVTELIRQLMEAQVIRRMDAELLTEAEL | 375 |
| salina PCC 8305_gvpK | DRAGESLQRLEEEILRLCEIFDVDPADLNVHLGELGTLLPKEGGYYPGETSDQPSILE | |
| | LLDRVLHTGVVIDGNLDLGIAQLNLIQAKLHLVLTSQPINN* | |
| Desulfobacterium | MIKDPEAKDFKIESDSIDAFARVMHADTSSCSSSSVTAGQRQQRLKIDEENIKNGL | 376 |
| vacuolatum_DSM | AQLVMTLIKLLHELLERQAIRRIESGSLDDDQIERLGLTLMQQCEEIDRLRKLFDLEE | |
| 3385_gvpK | EDLNLDLGPLGKLL* | |
| Desulfomonile tiedjei | MNPMNIAKVESDSLGDFAEIMQTDWISSLHSDKEEKRLNLNQDSVKNGLGQLVL | 377 |
| DSM 6799_gvpK | TLVKLLHDLLERQAIRRMEAGTLTDTEIDRLGTTLMMQAQEIERLRSEFGLEEEDLN | |
| | LDLGPLGKLL* | |
| Desulfotomaculum | MYIDISEGSLKQGVLGLLLALVEIIKDALKIQALKRIEGDSLTEDEIERLGNALHELEEA | 378 |
| acetoxidans_DSM | LVEIEMEHNLQNVVQNIREGLDNVVNEVVDTFNPERWIAENEFN* | |
| 771_gvpK | | |
| Dolichospermum | MLSTPADNFDESLTTVSKSKNEAGLAPLLLTVLELLRQLMEAQVIRRMEDNLLSESE | 379 |
| circinale_gvpK | LERAADSIQKLEEQILHLCETFEVDPAELNINLGDFGTLLPQSGSYYPGETGSRPSVL | |
| | ELLDRLLNTGVVLDGEIDLGLAQLDLIHAKLRLVLTSKPI* | |
| Enhydrobacter | MTKLLEAKTVDPDKAGDDLVKLVLALVETLRQLVERQAIRRVDSGVLNDDEVERL | 380 |
| aerosaccus strain | GLALLRLEEKMSELKAHFGFGDEELTLKLGSLGELARDV* | |
| ATCC 27094_gvpK | | |
| Isosphaera | MSDSLFEVRSPSAAPPSPVNPGVADEWTAVLKDWDTLTAQLRQATAPPNAENS | 381 |
| pallida_ATCC- | ARSHATTGRIDLDPEQVGDGLAKLVLTLLELIRQLLERQAIRRLDAGSLDHEQTERL | |
| 43644_gvpK | GLTLMRLAQRMEELKTHFGLQGEDLNLDLGPLGKLL* | |
| Legionella drancourtii | MNDKREEDNALPQRINLQPDDVKNGLGKLVLILIQLIHELLERQAIGRIEAGDLSDE | 382 |
| LLAP12_gvpK | QIDRLGITLMKQAEEIDKLREVFGLTQEDLNLDLGPLGKLL* | |
| Microcystis aeruginosa | MTLACTPYDSDNQALLTRPESNSQAGLAPLLLTVVELVRQLLEAQIIRRMEKGVLSE | 383 |
| NIES-843_gvpK | SDLDRAAESIQKLQEQILYLCEIFEVEPEELNVHLGEFGTLLPEAGSYYPGEEGIKPSV | |
| | LELVDRLLNTGVVVEGNVDLGLAQLDLIHLKLRLVLTSQPV* | |
| | MQAISKSKGSDSGLAPLLLTVVELIRQLMEAQVIRRMDAGTLNDSELDRAAESLQK | 384 |
| Nostoc punctiforme | LEQQVVQLCEIFDIDPADLNINLGEMGNLLPQSGGYYPGETSSQPSILELLDRLLNT | |
| ATCC 29133_gvpK | GVVVEGDLDLGLAQLSLVHAKLRLVLTSKPL* | |
| | MVCTPVEKSPNLLPTTSKANSKAGLAPLLLTVVELIRQLMEAQVIRRMEQDCLSES | 385 |
| Nostoc sp. PCC | ELEQASESLQKLEEQVLNLCHIFEIEPADLNINLGDVGTLLPSPGSYYPGEIGNKPSVL | |
| 7120_gvpK | ELLDRLLNTGIVVDGEIDLGLAQLNLIHAKLRLVLTSRPL* | |
| | MKTTSDSQFDSMKKILTDSSKEDSASCDPTDLLPNKSLPPSLSTSPETAADDLVKLV | 386 |
| Octadecabacter | LAVIDTVRQVMEKQAIRRVESGALAEAEIERLGLTLMRLEARMVELKSHFGLSNED | |
| antarcticus 307_gvpK | LNLHFGTVQDLKDILNDEE* | |
| | MKTQNDTQFDSMKKILTDSGGGDPNPNGSPDQTQHASLPSNLSTDPETAADDL | 387 |
| Octadecabacter | VKLVLAVIDTVRQVMERQAIRRVDSGALADEEIERLGLTLMRLEERMADLKSHFGL | |
| arcticus 238_gvpK | SNEDLNLNFGTVQDLKDILNDEE* | |
| Pelodictyon | MDSDKILYYAGSADEIIEELEKLKPGIQGRINATPDNVESGLAKLVLTLIELIRKLIEKQ | 388 |
| phaeoclathratiforme_ | AMRRIDGNSLSESQIEELGETLMKLEKKMEELKGIFNLTDKDLNLNLGPLGDLM* | |
| gvpK | | |
| Phormidium tenue | MTSENAEPDLSTTLALQPPAKTDAGLAPLLLTVIELVRQLMEAQVIRRMESGDLDD | 389 |
| NIES-30_gvpK | NDLERAADSLRKLEEQVVSMCEIFDVDPADLNIDLGEIGTLLPKEGNYYPGQKNQN | |
| | PTILELLDRLLDTGVVVEGDVDLGMAQLNLIHAKLRLVLTSKPI* | |
| Planktothrix agardhii | MSSSEPSIETIITPKSSRKDAGLAPLVLTLVELIRQLMEAQVIRRMEGNTLSEEELDR | 390 |
| str. 7805_gvpK | AAQSLQQLEIQVLKLCEIFEIDPTDLNIELSEFGTLLPKSGSYYPGENTQNPSILELLDR | |
| | LMNTGIVVEGSVDLGLAQLNLIHAKLRLVLTSKPL* | |
| Psychromonas | MPFEHFKSNNQADVNSDTKPAASVGGLNLESDDLKNGLGRLVLTLVKLLHELLER | 391 |
| ingrahamii 37_gvpK | QALRRMDAGSLQDDEIERLGLAFMKQAEEIDRLRKEFGLEVEDLNLDLGPLGRLL* | |
| Rhodobacter | MSAAMHLELGDVDAVLSQAARSLAAGGRLTLDPERVEQDLARLVLGIVELLRKLM | 392 |
| capsulatus SB | ELQAIRRMEAGSLTPEQEETLGLTLMRAEAALHEVAAKFGLQPADLILDLGPLGRS | |
| 1003_gvpK | V* | |
| Rhodobacter | MTYPFPPLLLRDDRLPPTEAPVTAPRIALDPDRLEHDLARILLGLMEMLRQIMELQ | 393 |
| sphaeroides | AIRRMEAGSLSESQQEQLGTTLMRAEAAIHEMAARFGLTPADLSLDLGPLGRTI* | |
| 2.4.1_gvpK | | |
| Rhodococcus hoagii | MRRRIDSDPESVERGLVALVLTLVELLRQLMERQALRRVDAGDLSDDQIERIGTTL | 394 |
| 1035_gvpK | MLLEEKMEELREHFGLEPEDLNIDLGPLGPLLAED* | |
| Serratia sp. ATCC | MTTNQLSHHSPVFGPTSPAIQRPITEANRHKIDIDGERVRDGLAQLVLTLVKLLHEL | 395 |
| 39006_gvpK | LERQAIRRMDSGSLSDEEVERLGLALMRQAEELTHLCDVFGFKDDDLNLDLGPLG | |
| | RLL* | |
| Stella vacuolata_ATCC- | MTGFLNGPADVETLETALRGRVDIDPERVEQGLVKLVLMVVETLRQVIERQAIRR | 396 |
| 43931_gvpK | VESGSLTDDEVERLGLTLMRLEEKMDQLRRQFDLGEEDLSMRLRLPLQEL* | |
| Thiocapsa rosea strain | MSDTRTGTAPSSAASAAPDTSTLQRANLLADLLETKVAAAGRRIDIDPERVQRGLG | 397 |
| DSM 235 | QLVLTVVKLLHVLLERQAIRRVDGGDLDEDEIEQLGLALMRQSEEIERLRRLLGLEE | |
| Ga0242571_11_gvpK | QDLNLDLGPLGKLF* | |
| Tolypothrix sp. PCC | MAMVCTPSENSNDLLATNSKANNQAGLVPLLLTVVELIRQLMEAQVIRRMEEECL | 398 |
| 7601_gvpK | SESDLERAAESLQKLEEQVLNLCQIFEIDPADLNIHLGELGSLLPAAGSYYPGETGNT | |
| | PSVLELLDRLLNTGVVVDGELDLGVAQLNLIHAKLRLVLTSKPLNTK* | |
| Trichodesmium | MSLENSPEESLIVPIDKSKSNPEAGLAPLLLTVIELLRELMQAQVIRRMDAGILSDEQ | 399 |
| erythraeum | LERAAEGLRQLEEQVIKLCKVFDIPTEDLNLDLGEIGTLLPKSGEYYPGEKSENPSVLE | |
| IMS101_gvpK | LLDRILNTGVVLDGTVDLGLAELDLIHARLRLVLTA* | |
| gvpL | MLYLYAILESPPPQKPLPPGIGGAAPLFVESHALVCAASEAADAAIAREPSQIWRH | |
| Ancylobacter | QEVVAALMEGRPVLPLRFGTVVEDSAACLRLLARHHAELSAQLDRVRHCVEFALR | 400 |
| aquaticus strain | VAGLSELADPGLDPNATPAGLGPGASHLRTLVRRERGWPVSSAAFPHDTLTAHAA | |
| UV5_gvp1_ | SRLLWARSPSQPDLRASFLVQRRSASAFLDDVNALQRLRPDLGITVTGPWPPYSFS | |
| | DPDLSGGRE* | |
| Aphanothece | MLYTYCFLFSPEKTLSLPQGFKGDLQMIEKGAIAAVVEPNLPKAELEEDDQKLVQA | 401 |
| halophytica (strain | VVHHDWVICELFRGLTVLPLRFGTYFRGEADLRSHLAAYEESYQQKLTALTGKVEV | |
| PCC 7418)_gvpL | TLKLTPIPFSEEGSSSTAKGKAYLQAKKQRYQQQSNYQTQQQEALEKLQEEIKKTYP | |
| | QLIHDEPKENTERFYLLIDSHSFSVFGEKMEQWKQFLSSWSIEISDPLPPYHFL* | |
| Aquabacter spiritensis | MLYLYAVLEAPPPARSLPPGIGGGAPHFIEAFELVCAASETPNRSVAPEPAEVWRH | 402 |
| strain DSM 9035_gvpL | QQVVEALIDRAPALPLRFGTLVEDASACRRLLTRHRDALGAQLGRVRHCVEFALRV | |
| | SGLPEEVAPDPGIGGGPGTSYLRTLARREAGWPPSTAVFPHDGLAAHAAERLLWA | |
| | RSTSQPDLRASFLVRKPNVAAFLADVSALQRVRPDLGITCTGPWPPYSFSDPDLSG | |
| | VSP* | |
| Bacillus- | MGELLYLYGLIPTKEAAAIEPFPSYKGFDGEHSLYPIAFDQVTAVVSKLDADTYSEKV | 403 |
| megaterium_gvpL | IQEKMEQDMSWLQEKAFHHHETVAALYEEFTIIPLKFCTIYKGEESLQAAIEINKEKI | |
| | ENSLTLLQGNEEWNVKIYCDDTELKKGISETNESVKAKKQEISHLSPGRQFFEKKKI | |
| | DQLIEKELELHKNKVCEEIHDKLKELSLYDSVKKNWSKDVTGAAEQMAWNSVFLL | |
| | PSLQITKFVNEIEELQQRLENKGWKFEVTGPWPPYHFSSFA* | |
| Burkholderia | MNDALYLFCFARAEPLAPAWAKRAPGEPRLQLLHEGNLAAVLCDVSRSEFAGAD | 404 |
| thailandensis sp. | AERRLADPAWIAGRVAVHAAAIEWTMRYSPVIPAQFGTLFSGAGRVIALMESCH | |
| Bp5365 strain | AHIGRVLDHVEGKTEWAVKGWLDRQAAADSQAALLRADEPESAARTAGARYLR | |
| MSMB43_gvpL | ERQLQARAGQNLRDWLEQSVPPISARLQRHAVEMCSRPCRASDSEHEIVANWAF | |
| | LVRNRDVPAFRRQAEAIDAEFATWGLHFDFSGPWPPYSFCAPLTEETTWSG* | |
| Chlorobium luteolum | MPCRLTVTWKSLRTAGLLPTAKGIQGRTERMAQNILYVYCIVRQLPGADIVARYP | 405 |
| DSM 273_gvpL | DLVFIEAGSAYVAAKYVSPLEYSDASMKLKLADEEWLDRNAREHLSVNVMIMAQ | |
| | QTIIPFNFGTIFKSRESLSGFLGDYGRKLDESFDALEGREEWAVKAYCNESFLLKNLH | |
| | LESPAIAAIEQEIQAASPGKAYLLKKKKEAMSASALEGVHQGHAKAVWGELAALSK | |
| | EHVLNRLIPEDVSGVDGRMIVNGVFLIANTDVGAFIRTTEDLGERYRDAGVFLDVT | |
| | GPWPPYDFVDIPY* | |
| Dactylococcopsis | MLYTYCLIASSPSALSLPSGFRGELQLIKQGAIAAIVEAELPLEELEENDQKLIQAVIH | 406 |
| salina PCC 8305_gvpL | HDAVICEIFQQIPLLPLRFGTYFPTEKDLLEHLDFKAEKYQKKLQEIQDKVELTLKLTP | |
| | LPFSTENASPMEKQGKNYLKAKKQRYQEQTNYQSQQQAELNQLQTQINQDYPQ | |
| | FIHGEPKENIERFYLLIKERDRSVFSEQLEQWKKDFPTWTIEVSDPLPPYHFIE* | |
| Desulfobacterium | MEKKKAVYLYCVTRANKFNAPGITGIDANTPVCFEHLENFVAVYNIIPLNTFVGTSA | 407 |
| vacuolatum-DSM | EENMKNIDWIGPRAMRHENVIERMMQESSVYPARFATLFSSMENLRETLHLKSG | |
| 3385_gvpL | LISRFLNQTQHKCEYSLKGFINRKQLLEFLIKTKFKQEKKQLDGLSPGKKYFAQHQF | |
| | NKKVETGINQWIKRRCGIFLDHLTKRNPEVSPRELFTEKTEKNNLEMMFNLAFLIH | |
| | NDSKSAFLQEISQAEKEFSQTGISLVVSGPWAPYSFCKTTRGEGL* | |
| Desulfomonile tiedjei | MSNVLYLFCLARTGLVDHIEGTGITGTEDLILKNFSGVTAVTCEVPEDDFSGESAEIK | 408 |
| DSM 6799_gvpL | LQDLAWVGPRAVRHDRIIEEIMQYSPVFPAPFGSLFSSEKRLGTLIESNIDAIREFLD | |
| | HTADKQEWSVKGLVCKSKAVDEIFTGKLKILSETLSSSPAGMRYFKERQMRSEAEK | |
| | ELSGKVKAACTVVGEKLLACSNNFRQRKNISFGKAEGDKQLVVNWAFLVDHSRIS | |
| | YFLDQVEHANSNYQAGGLAFECSGPWPPYSFCPSLHMEPTR* | |
| Desulfotomaculum | MNLIDDCKAKYIYCIGENPGNWPSEVMGVEGSLVYHVVYRDIAAVVHDCAEQPY | 409 |
| acetoxidans-DSM | NSDDNNKVIDWVLGHQLVVDKACSCYSSVLPFTFNSIVKGKEDLSSHEILVNWLED | |
| 771_gvpL | NYDNFKLKLGKIKGKKEYSVQLFLDKQVSLSLLQSESDILELQVELLGSAKGKAYFVQ | |
| | EKINKKIGELMANRADSYCRQFYHEISSVVSECKLCKLKQAGRNEIMIINLVCLAGD | |
| | NEVEVLGDVLEKIKSNDIAIKIKFSGPWPAYSFV* | |
| Enhydrobacter | MLYVYGIADNAFEVLRGAGLLNSDVFAVPAGCLAAAASKLAQGGIETTPQGVWR | 410 |
| aerosaccus strain | HEQVLRQLMQDHAVLPLRFGTICRDRETLTDRLMEASDDLVRGLGRVRGKVEIAL | |
| ATCC 27094_gvpL | RIVDEREHEAHPVPSETPTVDAIGGGRGTAYLRARRRHHAAEMGREARAERVGK | |
| | MLSAYIDVGAEDLVCSVAPEGDHAVSVSCLLGRDQLATLQAALERFQSDHPAIGLS | |
| | WTGPWTPYSFVAPSLFGVGLP* | |
| Legionella drancourtii | MNKALYLFCLTPASDLPMMEGELLPNFSPLFIHPFQTFNAILSWVPAKEYQEQSTD | 411 |
| LLAP12_gvpL | SNLINTEEFMQRVFFHELVVEKIMRDEAVFPIGFGTLFSSIASLEEQILTHQTLISSCL | |
| | ANLNQKDEYAVRVYLNQDKALESLLSVMLQERESSWASSSPGVQYLKKQQLHNEI | |
| | QRNLNQHLGGMLDEVLSMFQRHATDFKSRENTAQSSDIHGTSILHWAFLIPRVVS | |
| | SIFKEQVDLMNAKYNPFGLHFVLTGPWPAYSFCTLQSVEAP* | |
| Lyngbya confervoides | MRWHRSEAVISYCDLSMIYLYALCPNSTETNNLPEGIGTAQVEVLTVGTLGAVIER | 412 |
| BDU141951_gvpL | DVDIAQIQKDDAQLMAAVLAHDRILSHLFTYSPLLPLRFGTQFSNSEAVTTFLKTQ | |
| | GETYRQKLSHLQDRAEYLVKLIPQPLDLPAIASDLKGREYFLAKKQRLQDHTAALN | |
| | QQADELQTFLTDLATQDIPLVRSAPQDHEERLHVLLSRDTDTTEQVIMTWQEQLP | |
| | NWQVVCSEPLPPYHFAA* | |
| Octadecabacter | MKRLYVYGIVGATSFDDPLPNGHDEASVFALVSGDIAVAVSFVERSAVEASAANV | 413 |
| antarcticus 307_gvpL | WLHDNVLSALMTRYAVLPMRFGTIAVGATQLLEGIVKRQKQLMKDLMRLNENV | |
| | EIALHISGKNWEKVNQKVTKKNTDQAITQGTAYLLGRQQSLYGSDKTQLLVQNVR | |
| | RAIRSGLDPLMKDVIWPIDKPQALPFKASCLINRNDVASFVQIVNDIAAQNLDARV | |
| | TCTGPWAPYSFVGKSGVEGET* | |
| Octadecabacter | MTKLYVYGIVGATHFDVKLPNGHDEAPVFAIVSGDLAVAVSSLERSAVEASAANV | 414 |
| arcticus 238_gvpL | WLHENVLSALMEGHAVLPMRFGTIATGAAQLLGDIVKRRGQLMKDLTRLDGKVE | |
| | IALRISGKNREKVEQRIAGQIVDTNVTQGVAYLQEKQQNLYGSFYTQSSVQCARRA | |
| | IRSQLDPFIVEAIWPTDEPQMLPFRASCLIKKGDIARFVQTVDDVVVKVSDIRVTCT | |
| | GPWAPYSFVGQSGSEAET* | |
| Pelodictyon | MVAIQERLIYIFCVTSEPPLLQQYQLQKGICVVDVDGLFVTTMDVTDNDFAENQL | 415 |
| phaeoclathratiforme_ | QSNLSDVVWLDTKVREHLDVITSIMQHVKSLIPFNFGTLYKSESSLMQFIIKYAEEFK | |
| gvpL1 | KNLVYLEEKEEWAVKLYCNKNKIVENITHLSKKVSDINALIQNSSIGKAYILGKKKNEI | |
| | IENEIINIYNTYSKKIFTKFSILSEEFRFNPIPNNETLEKEDDMILNVVLLLNKANVESFI | |
| | ETSDQUIQHQNIGLNIEITGPWPCYSFINISH* | |
| Pelodictyon | MPLIIYAIFDSINYIDSFSSYVDAISLKSKIKLEIISTSTLSAIVSRTTDEKKQACQNDVM | 416 |
| phaeoclathratiforme_ | IYATIIGDIAAKYSILPMRYGSIVSSPFDVTELLKNHNETFVTIIKKITDKEEYSLRILYSH | |
| gvpL2 | QDKEKNNIEDLFDLPQNVPDILHGNTDSKKYLLNKYIKHLSEEKRLQYIDKIQSIVAC | |
| | NLQKITDLIVYNKQTTTGFIVDAVFMIERSKKSELLDLVIQMQTLFSEHNVVLSGPW | |
| | PPYNFSNINIG* | |
| Psychromonas | MKNSNHSGLDPNQALYLYCFVHADSIQSVTSQAIEKDSPVFIYQWQDIAAVLSHV | 417 |
| ingrahamii 37_gvpL1 | PTSYFTGYDDEEPEQTIARILPRTQLHEQVIEEVMRQSPVFPAQFGTLFSSQESLEQ | |
| | EISQQYLAITHTLKEVSGSVEWAVKGVLDRGVAEKALYSQQLTEQQNSLSSSPGM | |
| | RHLQEQRLRRETQSKLNSWLHQLYTDIATPLSELSGDFFQRKIPSSIEEGKEVILNW | |
| | AFLVPESAGDDFHAQIDKLNQRLNSFGLVIQCSGPWPPYSFCNQSS* | |
| Psychromonas | MKNSNHSGLDPNQALYLYCFVHADSIQSVTSQAIEKDSPVFIYQWQDIAAVLSHV | 418 |
| ingrahamii 37_gvpL2 | PTSYFTGYDDEEPEQTIARILPRTQLHEQVIEEVMRQSPVFPAQFGTLFSSQESLEQ | |
| | EISQQYLAITHTLKEVSGSVEWAVKGVLDRGVAEKALYSQQLTEQQNSLSSSPGM | |
| | RHLQEQRLRRETQSKLNSWLHQLYTDIATPLSELSGDFFQRKIPSSIEEGKEVILNW | |
| | AFLVPESAGDDFHAQIDKLNQRLNSFGLVIQCSGPWPPYSFCNQSS* | |
| Serratia sp. ATCC | MTMNTEAQTEQAIYLYGLTLPDLAAPPILGVDNQHPINTHQCAGLNAVISPVALS | 419 |
| 39006_gvpL | DFTGEKGEDNVQNVTWLTPRICRHAQIIDSLMAQGPVYPLPFGTLFSSQNALEQE | |
| | MKSRATDVFVSLRRITGCQEWALEATLDRKQAVDVLFTEGLDSGRFCLPEAIGRRH | |
| | LEEQKLRRRLTTELSDWLAHALTAMQNELHPLVRDFRSRRLLDDKILHWAYLLPVE | |
| | DVAAFQQQVADIVERYEAYGFSFRVTGPWAAYSFCQPDES* | |
| Stella vacuolata-ATCC- | MLYLYAVLEALPAARTLPAGIGGGELLFVEAFELVCAASETPERAIAPEPTQVWRH | 420 |
| 43931_gvpL | QQVVEALIDCAAALPLRFGTLVEDAVACRRLLTRHREALCAQLDRVRHCVEFALRV | |
| | SGLREEVGSDHVIGGGPGVSYMRALARREASWPPSTGTFPHDGLAAHAADRLLW | |
| | SRSASQPDLRASFLVLKPNVAAFLADVSALQRMRPDLGITCTGPWPPYSFSDPDLS | |
| | GMSP* | |
| Thiocapsa rosea strain | MDAFYCFCFAPACLASDLRFDDCGWEDPIEIRRLAGLDVILSRVPLGRFAGAEAEQ | 421 |
| DSM 235 Ga0242571- | RLADLEWLVPRAQAHDRVITRTMERSTVFPLTFATLFSSLPALALEVAARRRALLDF | |
| 11_gvpL | FERMAGREEWAVKVSMDRERVIATRMQSLYPEGGDVPAGGRGYLLKQRRRGEA | |
| | EQAIGPWLKGQIGCLDEALRPSCETLLIRPLRDEMVASRACLVARDLGPSLSEAIER | |
| | SREAFADQGLDLHCSGPWPLYSFCGTP* | |
| Trichodesmium | MSYYVYGFLYLPESCLALPKGMEKEVELVPYQNIAAVVEANVSIEAIQETEEKLLEAI | 422 |
| erythraeum | LAHDRVVREIFQQVSMLPLRFGNAFALRENIINDLQNNQQQYLNILTKLQQQAEY | |
| IMS101_gvpL | TITFTPVSYPSTLEVSKVRGKAYLLAKKQQFEQQQAFQTKQRQQWENIRQLIFKNY | |
| gvpN | PKAVFRDSTESKIKQVHLLANRDARVITTEELSTWQTECSYWQITLSEQLPPYHFV* | |
| Anabaena-flos- | MTTTKVNHKRAVLRLRPGQFVVTPAIERVAIRALRYLKSGFPVHLRGPAGTGKTTL | 423 |
| aquae_gvpN | AMHLANCLDRPVMLLFGDDQFKSSDLIGSESGYTHKKVLDNYIHSVVKLEDEFKQ | |
| | NWVDSRLTLACREGFTLVYDEFNRSRPEVNNVLLSALEEKILSLPPSSNQPEYLSVN | |
| | PQFRVIFTSNPEEYAGVHSTQDALMDRLVTISMPEPDEITQTEILIQKTNIDRESAN | |
| | FIVRLVKSFRLATGAEKTSGLRSCLMIAKVCADNNIPVTTESLDFPDIAIDILFNRSHL | |
| | SMSESTNIFLELLDKFSAEELEILNNRVTGDNDFLIDNSQFVSQQLAGQPN* | |
| Ancylobacter | MTSEAASKDPISLLSGFGAGAASSGPKAGGRSTPSALTPRPRTGFVEAEQVRDLTR | 424 |
| aquaticus strain | RGLGFLNAGYPLHFRGPAGTGKTTLALHVAAQLGRPVIIITGDNELGTADLVGSQR | |
| UV5_gvpN | GYHYRKVVDQFIHNVTKLEETANQHWTDHRLTTACREGFTLVYDEFTRSRPETHN | |
| | VLLGVFEERMLFLPAQAREECYIKVHPEFRAIFTSNPQEYAGVHASQDALADRLATI | |
| | DVDYPDRAMELAVASARTGMPEASAARIIDLVRAFRASGDYQQTPTMRAGLMIA | |
| | RVAAQEGFEVSVDDPRFVQLCSDALESRIFSGQRAEEVAREQRRAALHALIDTHCP | |
| | SAAKPRARRAGGAVRASIEGAQS* | |
| Aphanizomenon flos- | MTKTNHKRAVLRVRPGQFVVTPAIEQVAIRALLYLKSGFPIHLRGPAGTGKTTLAL | 425 |
| aquae NIES-81_gvpN | HLAHCLDRPVMLLFGDDEFKSSDLIGSESGYTHKKLLDNYIHSVVKVEDEFKQNWV | |
| | DSRLTLACREGFTLVYDEFNRSRPEVNNVLLSALEEKILSLPPSSNQPEYLSVSPQFR | |
| | AIFTSNPEEYCGVHSTQDALMDRLVTINMPEPDEITQTEILIQKTNIQKESAHLIVRL | |
| | VKSFRIATGAEKTSGLRSCLMIAKVCADNNLVAEPENSFFQEIAMEILSNRTHLSVN | |
| | ESTDIFLDVISQFSNKEIEILNDAELGSLPTMDTLANTDLGNDVPLEKEASDYVIQQK | |
| | NNEFKGFQKPSTKVLN* | |
| Aphanothece | MTTVLHARPKGFVSTPTIDRISRRAWRYLQSGFSIHLRGPAGTGKTTLAMHLADLL | 426 |
| halophytica (strain | NRPIMLLYGDDEFKSTDLIGSNTGYTRKKVVDNYIHSVVKEEDELRQQWVDSRLT | |
| PCC 7418)_gvpN | MACREGFTLVYDEFNRSPPEVNNVLLSALEEKLLVLPPDSHRSEYVRVSPNFRAIFT | |
| | SNPEEYWGVHGTQDALLDRVVTINVPEPDLETQREIIVQKVGINADDGDMIVNFV | |
| | RNFRDRAEMENSSGLRSCLMIAQVCHQHEIPVQTSNEDFQDICYDILTSRCPLSTQ | |
| | ESISLLEQLFREYELELVVEDEDEDVPSVIVEGETEDLSSDEKPHLRLSHPFGNTEND | |
| | * | |
| Aquabacter spiritensis | MSTEPAPLVSPSQDVETTPQRPARPEPAEALAVGYRLSARPASPATLTPRPRADFV | 427 |
| strain DSM 9035_gvpN | ETDQVKDLTRRGLGFLRAGYPLHFRGPAGTGKTTLALHVAAQLGRPVIVITGDNEL | |
| | GTADLVGSQRGYHYRKVVDQFIHNVTKLEETANQRWTDHRLTTACREGYTLVYD | |
| | EFTRSRPETHNVLLGVFEEKILFLPAQAREECYIRVHPDFRAIFTSNPQEYAGVHAS | |
| | QDALADRLATIDVDYPDRGMELAVASARTGLGETEAARIIDLVRAFRASGDYQQT | |
| | PTMRASLMIARVAAQEGLRVSIDDPGFVQLCMDALESRMFSGARLEAATRETSR | |
| | AALLALLAVHCPSEAPIVRVTAARRAKKADAS* | |
| Arthrospira platensis | MTTVLRAVPKGFVNTPAIERITVRALRYLQSGFSVHLRGPAGTGKTTLALHLADLLN | 428 |
| NIES-39_gvpN | RPIMLIFGDDELKSSDMIGNQTGYTRKKVVDNFIHSVVKLEDSLKQNWIDSRLTLA | |
| | CREGFTLVYDEFNRSRPEVNNVLLSALEEKLLVLPPNNSRSEYIRVNPHFRAIFTSNP | |
| | EEYCGVYSTQDALLDRLITMNMPEPDEATQQEILIQKVAVTPEEAQTIVTLVQQFR | |
| | EATHAIAPSKIQTVARQQTNADKASGLRPSLMLARICQEHNIPIVPIDPDFQEVCR | |
| | DILLSRAIGDITELESRLHQIFDHLSGLENDQIIALPPREELTTSSVPNNLSDTEQKIYT | |
| | YIKDSDGARVSEIEIALGLNRVQTTDALRSLLRKSYLTQQDNRLFVVYEGD* | |
| Bacillus- | MTVLTDKRKKGSGAFIQDDETKEVLSRALSYLKSGYSIHFTGPAGGGKTSLARALAK | 429 |
| megaterium_gvpN | KRKRPVMLMHGNHELNNKDLIGDFTGYTSKKVIDQYVRSVYKKDEQVSENWQD | |
| | GRLLEAVKNGYTLIYDEFTRSKPATNNIFLSILEEGVLPLYGVKMTDPFVRVHPDFRV | |
| | IFTSNPAEYAGVYDTQDALLDRLITMFIDYKDIDRETAILTEKTDVEEDEARTIVTLVA | |
| | NVRNRSGDENSSGLSLRASLMIATLATQQDIPIDGSDEDFQTLCIDILHHPLTKCLD | |
| | EENAKSKAEKIILEECKNIDTEEK* | |
| Bradyrhizobium | MLRSDRAAIAGGQRGSRAQGDAVARNDAAAGSRAAIAQISPRPDADNAALSPA | 430 |
| oligotrophicum | PRTDLFENPQLASMAARALTYLNAGIPVHLRGPAGTGKTTMAMQLAARLGRPVV | |
| S58_gvpN | LLTGDDGLTAAHLVGREIGTKSRQVVDRYVHSVRRVETETSSMWCDAVLAQAVV | |
| | EGLTFVYDEFTRSPPQANNPLLSVVEERILIFPAGSRKERLVHAHPEFRAILTSNPEEY | |
| | AGVSRPQDALLDRLITFDLDDYDRETEIGIVSNRTGLAYAEAGVIVDLVRGVRRWP | |
| | KAHHPPSMRSAIMIARIVARELITPSVDDPRFVRLCLDVLAAKAKPTDRDDRDRFA | |
| | ATLLRLMNNHCPAGAIDGG* | |
| Burkholderia | MEASAEFVQTPAVRNLTERALTYLGAGYGVHLAGPSGTGKTTLAFHIAAQLGRQV | 431 |
| thailandensis sp. | VLMHGDDELGSADLVGRGAGYRRSRVVDNFIHSVVKTEEEMTTTWIDNRLTTAC | |
| Bp5365 strain | QHGLTLIYDEFNRSRPEANNALLPVLSEGILNLPNRMTGAGYLTVHPGFRAIFTSNP | |
| MSMB43_gvpN | EEYVGVHKTQNALMGRLITIQVGHYDRETEVEIVRARSGIARADAERIVDLTRRLR | |
| | DADDNGHHPSIRAAIALARALSYCGGEATPDNAGYVWACRDILGVDLEQDARTR | |
| | SQAGRRTKARR* | |
| Chlorobium luteolum | MRAAVNDNEMNTVLAPRPMANFVETEYIRDITERGLTYLKAGFPVHFRGPSGTG | 432 |
| DSM 273_gvpN | KTTVAMHLAGKIGRPVVVIHGDSEYKTSDLIGSEQGYKFRRLNDNFIHSVHKYEED | |
| | MSKQWVNNRLSIAIKKGFTLVYDEFTRSRPEANNILLPILQEKMLSTSASNEEDYY | |
| | MKVHPEFRAIFTSNPEEYAGVNRTQDALRDRMVTMDLDYFDYETELRVTHAKSEL | |
| | TLEDSEKIVQVVRGLRESGKTEFDPTVRGSIMIARTLHIMQVRPEKTNDAVRKVFQ | |
| | DILTSETSRVGSKTNQEKVRAIVNDLIEAYL* | |
| Dactylococcopsis | MTTVLHARPKGFVSTPTIDRISGRAWRYLQSGFSIHLRGPAGTGKTTLAMHLADLL | 433 |
| salina PCC 8305_gvpN | NRPIMLLYGDDEFKSTDLIGSNTGYTRKKVVDNYIHSVVKEEDELRQQWVDSRLT | |
| | MACREGFTLVYDEFNRSPPEVNNVLLSALEEKLLVLPPDSNRSEYVRVSPNFRAIFT | |
| | SNPEEYWGVHGTQDALLDRVVTINVPEPDLETQQEIITQKVGINANDGEKIVNFV | |
| | RQFRDRAAVKNSSGLRSCLMIAQVCHQHEIPVQTSDEGFRDICYDILSSR | |
| Desulfobacterium | MSASMSSMKETRQRMSAPEQDNVVPEAGSDFVETPYVKDITDRALAYLHVGYP | 434 |
| vacuolatum_DSM | VHFSGPAGTGKTTLAFHVAAKLKRTVMLIHGDDEFGSSDLIGKDSGYRKAKVVDN | |
| 3385_gvpN | YIHSVVKTEESMNTVWADNRLTIACQQGCTLVYDEFTRSRPEANNAFLSVLEEKIL | |
| | NIPSLRDIDQGYLQVHPEFRAIFTSNPEEYAGVHKTQDAMMDRLITITLDHFDRDT | |
| | EVQVTMSKSDLPQKDAEKIVDIVRKLRKTGVNNHRPTIRACIAIGKILKHMGGGAS | |
| | KDNFVFKQICRDVLNVDTTKVTRDGEPLLPRKIDELINSL* | |
| Desulfomonile tiedjei | MNGAELRIASIETEVITANNENIVPEAGDRFVNTPHVEELTARAMAYLEVGYSVHF | 435 |
| DSM 6799_gvpN | SGVAGTGKTTLAFHAAAKLGRPVILVHGDHEFGSSDLIGRDAGYKKSRLVDNFIHS | |
| | VVKTEEEMRSLWVDNRLTTACRDGYTLIYDEFTRSRPEANNVLLSILEEKILNLPSLR | |
| | RTGEGYLEVHPSFRAIFTSNPEEYAGVHKTQDALMDRIITINVDHYDRETEIEITRAK | |
| | SGVCKQDATVIVDIIRELRLLGVNNHRPTIRAAIAIARVLAHTGEHADQHNSVFQW | |
| | LCKDVLSTDTVKVSRGGSPLMAKKVEEVIRKVCGRTGGKRSGKPVGSKEETSE* | |
| Desulfotomaculum | MQLNGLDKNSIINPVVLSDFVVTDYISNVVDRALAYIKAGFAIHLRGRSGTGKTSIA | 436 |
| acetoxidans_DSM | MYISSKLNRPTLVIHGDEEFRTSDLIGGRYGYRIRKTIDNFVQSVVKVEEDLVERWV | |
| 771_gvpN | DSRLTTACKNGYTLVYDEFTRSRPEANNILLSVLQERLLDISVARGAEEGYVKVHPD | |
| | FTAIFTSNPEDYAGVYGSQDALRDRMVTLDLDNYDKETEISIIKSKSKLSREDSERVV | |
| | NILRDLRELGDCEYGPTIRGGIMIAKTLQVLGAPVDKNNEMFRQICEEVLASETSRA | |
| | GNLQALRKVRKVINELFNKYA* | |
| Dolichospermum | MSITKVNHKRAVLRLRPGQFVVTPAIERVVIRALRYLRSGFPIHLRGPAGTGKTTLG | 437 |
| circinale_gvpN | MHLANCLDRPVMLLFGDDQFKSSDLIGSESGYTHKKLLDNYIHSVVKVEDEFKQN | |
| | WVDSRLTLACREGFTLVYDEFNRSRPEVNNVLLSALEEKILSLPPSSNQPEYLSVNP | |
| | QFRVIFTSNPEEYCGVHSTQDALMDRLVTINMPEPDEITQTEILIQKTNIGRESANLI | |
| | VRLVKSFRLATGAEKTSGLRSCLMIAKICADHDIPASTEDLDFREIAIDILFNRAQLSIS | |
| | ESTDIFMGLLEQFSAEEIKVLNDTHFPTDELLINNSQFITQELVTQPNTELATDIPQE | |
| | LRKTEQN* | |
| Enhydrobacter | MSMDQAEEIGVVTTIEPRPRADFVRTQSVEATARRALGYLNAGFSVHFRGPAGT | 438 |
| aerosaccus strain | GKTTLALHLAALLGRPMVMITGDEEMLTSTLVGTQHGYHFRRVVDRFIHTVTKTE | |
| ATCC 27094_gvpN | ETADKRWADHRLTTACREGYTLIYDEFTRSRPEANNVLLSVLEEGLLVLPAQNQNE | |
| | PYIKVHPNFRVIFTSNPQEYAGVHDAQDALGDRIVTIDMGHADRELELAIAAARSG | |
| | LPPTQVAPIVDMVREFRETGEYDQTPTLRTSIMICRMMSQERLAPTIEDQQFVQIC | |
| | MDILGGKSLPGGKGDNKRAQQQKMLLSLIEHHCPARSFTSVGEV* | |
| Isosphaera | MDYESTALQLKPRPDFVATPWVRELADRALGYLTAGYPVHFSGPAGTGKTTLAM | 439 |
| pallida_ATCC- | HLAALVNRPVVLLHGDDEFGSSDLVGDHLGFRSTKVVDNFIHSVVKTEQSVSKTW | |
| 43644_gvpN | VDHRLTTACRHGFTLIYDEFNRSRPEANNILLTILEERLLELPPIAGGRDGSGPLRVH | |
| | PEFRAIFTSNPEEYAGVHKTQDALLDRMITISMGGHDEATETEITAAKSGLSRDEA | |
| | ARIVELARAVRALKPLRHPPTIRSCLMIAKVAALRKVPIDPNDALFLAICRDVLRIDAL | |
| | PVDDPEATFAELIRRVFAPTPAVAPPRVPTTGFAANRVVPIPRRPLAASASPPPGA | |
| | NGHAHLR* | |
| Legionella drancourtii | MMTQENNGSLTDSKNNDKLIRFVNNRSDNILLEASEEFTETPHIRGISERALAYLDI | 440 |
| LLAP12_gvpN | GYPIHLLGPAGTGKTTVALHIAAQLGRPVILIHGDDEFTGADLVGRGTGYHHSKLV | |
| | DNFIHSVLKTEEEMTTMWTDNRLTTACEQGYTLIYDEFNRSRAEANNALLSVLSEG | |
| | ILNLPGRRERDGIGYVDVHSNFRAIFTSNSEEYVGIHKTQNALADRLIAIKMDYPDQ | |
| | QSEIQIIEKKSTLPRKDIEIIVNLARELRLKSEKRPSIRGCIAIARVLAYHNRHAHADDPI | |
| | FQAVCQDIFGISKEFLKQLLHPMDSGLQKRSEKNQESIKKYKTKNQKL* | |
| Lyngbya confervoides | MSTVLQARPRNFVSTPAVERIARRALRYLQSGYSVHLRGPAGTGKTTLALHLADLL | 441 |
| BDU141951_gvpN | SRPIMLVFGDDEFKTSDLIGNQSGYTRKKVVDNYIHSVVKVEDELRHNWVDSRLTL | |
| | ACREGFTLVYDEFNRSRPEVNNVLLSALEEKLLVLPPSGHRPEYLRVNPHFRAIFTS | |
| | NPEEYAGVHGTQDALLDRLITIHMPEPDELTQQQILIQKVGIEPADALMIVRLVKA | |
| | FKSQMGNHSATSLRPSLMIANICHEHGVAMMTEDADFRDVCSDVLLSRVTNELS | |
| | PATHTLWDLFNELTASADVLGPESNSTDVSPQPEADKPVETKGSKGKSTTKSKAKE | |
| | SAKASEEADEAGDDSASAPELDEIESSILTFLTARESASLSEIESELSLTRFKAVDALRS | |
| | LVEAGYLQKQNGAGKPAIYGLVPEES* | |
| Microcystis aeruginosa | MTVTETQTRRAVLSLRPGQFVVTPSIDQIATRALRYLNSGFSIHLCGPAGTGKTTLA | 442 |
| NIES-843_gvpN | MHLANCLARPVMLIFGDDDFTSSDLIGSQSGYTHKKLMDNYIHSVLKVEDELKHN | |
| | WVDSRLTMACREGFTLVYDEFNRSRPEVNNVLLSALEEKILTLPPTSHQPDYLQVN | |
| | SQFRAIFTSNPEEYCGVHATQDALMDRLVTINMPEPDQLTQTEILAQKTGIGRED | |
| | ALFIVNLVKTFRVKTATEKTSGLRSCLMIAKVCASHDIAANSADSDFRDICADVLLSR | |
| | TNLSVDKSRAILWEILEDNPLESLSFLEEEEPSDAQVSTSEPSTGNQSLKAIQSLLRG | |
| | NLPQRKD* | |
| punctiforme | MTTVLNASPQRFVNTPAVQRIAQRALRYLQSGFSIHLRGAAGVGKTTLAMHLADL | 443 |
| ATCC 29133_gvpN | LNQPIILLFGDDEFKTSDLIGNQLGYTRKKVVDNFIHSVIKVEDEVRQHWVDARLTL | |
| | ACKEGFTLVYDEFNRSHPEVNNVLLSVLEERLLVLPTNQHRAEYIRVHPQFRAILTS | |
| | NPQEYCGVHATQDALMDRVITIDMPTPDELSQQEIVVHKTGIDSEKAEVIVRIVRT | |
| | FWSRSGSGQGGGLRSCLMIAKICHEHEISVNPGDPSFQDICADILLSRTNQPLIEAT | |
| | RLLEEVLSEFYHRINTQSQPSEIIPNNQNQIVLEQRVPYEHEVYNYLCNSPGRRFSEL | |
| | AVELGIDRSQIVAALKSLREQGVLVQMQGNAESPSISQTVAFDSGHLINK* | |
| Nostoc sp. PCC | MTLTANNKKRAVLRVRPGQFVVTPAIEQVAIRALRYLTSGFAIHLRGPAGTGKTTL | 444 |
| 7120_gvpN | AMHLANCLDRPIMLIFGDDEFKSSDLIGSESGYTHKKLLDNYIHSVLKVEDEFKQN | |
| | WVDSRLTLACREGFTLVYDEFNRSRPEVNNVLLSALEEKILTLPPSSNQPEYLHVNP | |
| | QFRAIFTSNPEEYCGVHSTQDALMDRLVTINMPEPDELTQTEILAQKTALNRADAL | |
| | LIVRLVKAFRSRTGGEKTSGLRSCLMIAKVCAEHNILVSPQSSDFREICADVLFNRTN | |
| | WSASEAATIFLELLNHLDLQQIEEFKNSIIPEDTDAIAEGGFPTIIDSHFGTLDSEVLE | |
| | QPGVEDSIPFEQEIYLYLQQYKSAALALVQQEFELSRTVATNALNSLEQKGLVSKNN | |
| | HVYTIEEPNQS* | |
| Octadecabacter | MNSNLRATNSGGPDISKTMMPEAREDFVQTESVKSISRRALAYINAGYSVHFRGP | 445 |
| antarcticus 307_gvpN | AGTGKTTMAMHTAALLGRPVVLITGDEEMITSNLVGAESGYNYRKVTDNYIHTVS | |
| | KIEESSDRSWNDHRLTTACREGYTLIYDEFTRSRAEANNVLLSVLEEGILVLPAQNR | |
| | GEPFIKVHPNFRVIFTSNPQEYAGVHEAQDALSDRIVTIDIGEADRELEVSIASSRSG | |
| | LEVAKTEPIVDMVRAFRDTGEYDQTPTLRACIVICRMVANEKLNTTIDDPFFVQICL | |
| | DVLGSKSTFGGKEHDKRTQQRKLLLDNLKHYCPSKVSTKPSAKDDESKSTLIQVSSR | |
| | GSL* | |
| Octadecabacter | MMPEARKDFVQTDSVKSVSRRALAYINAGYSVHFRGPAGTGKTTMAMHTAALL | 446 |
| arcticus 238_gvpN | GRPVVMITGDEEMVTSNLVGAESGYNYRKVTDNYIHTVSKVEESSDRSWNDHRL | |
| | TTACREGYTLIYDEFTRSRAEANNVLLSVLEEGILVLPAQNRGEPFIKVHPDFRVIFTS | |
| | NPQEYAGVHDAQDALSDRIVTIDIGAADRELEVSIASSRSGLEVAKTAPIVDMVRA | |
| | FRDTGEYDQTPTLRACIMICRMVANEKLNPTIDDSYFVQICLDVLGSKSMFGAKEQ | |
| | GKRTQQEKLLLDNLSHHCPSPPPSKPSAKEAEAKPRSIQATSRGPA* | |
| Pelodictyon | MRRQGCDSEMNTVLEPKPMPNFVETDYIRDITSRGLTYMKAGFPVHFRGPSGTG | 447 |
| phaeoclathratiforme_ | KTTVALHLASKIGRPVVIIHGDSEYKTSDLIGSEQGYKYRRLDDNFIHSVHKYEEDM | |
| gvpN | TKQWVNNRLTIAIKKGFTLVYDEFTRSRPEANNILLPILQEKMMSTSSSNEEEYYM | |
| | KVHPEFRAIFTSNPEEYAGVNRTQDALRDRMVTMDLDYFDYETELMITHAKSGM | |
| | SLDDAEKIVKIVRGLRESGKTEFDPTIRGSIMIAKTLNVLNARPDKTNELFKKVCQDI | |
| | LTSETSRVGSKTNQERVRGIVNELIDLHS* | |
| Phormidium tenue | MNTVLQARPRNFVSTPTLERTSIRALRYLQSGYSIHLKGPAGTGKTTLALHLADLLA | 448 |
| NIES-30_gvpN | RPIMLLFGDDEFKTSDLIGNQSGYTRKKVVDNYIHSVVKVEDELRHNWTDSRLTLA | |
| | CREGFTMVYDEFNRSRPEVNNVLLSALEEKLLVLPPSNNRAEYIRVSPHFRAILTSN | |
| | PEEYCGVHGTQDALQDRLITINMPEPDELAQQQILVQKVGIDSSAALQIVQLVKAF | |
| | QSAVAPDMVSSLRPSLMIATICHDHDILPLAENADFRDVCSDILLARSKEPAPDATR | |
| | HLWNLFNRFVVSQAALVNDLSLKPEAHPTARFHGEEEDDAPLQPLEALVESDIDD | |
| | VAVEDQPVIGPQDLQGETLPEAVIPEPQGETVVETPAEAEALPEEIARVQVSPDDIE | |
| | TRIFDYLDATGTASLVNIEAALDLNRFQAVNAVKSMLDQGLIEKQETDGQLQGYQ | |
| | LSSN* | |
| Planktothrix agardhii | MTTVLQARPKGFVNTPTIEQLTIRALRYLQSGFSLHLRGPAGTGKTTLAMHLADLL | 449 |
| str. 7805_gvpN | NRPIVLIFGDDELKSSDLIGNQLGYTRKKVVDNFIHSVVKLEDELRQNWIDSRLTLA | |
| | CKEGFTLVYDEFNRSRPEVNNVLLSALEEKLLVLPPNNSRSEYIRVNPHFRAIFTSNP | |
| | EEYCGVYGTQDALLDRLITIDMPEPDDETQQEILIQKIGISPEDAKNIIEIVKIYLEITT | |
| | QKKEIKPVQNGKAARPHIDKASGLRPGLIIAKICHEHDISIQENNQDFIKVCADILLS | |
| | RTNLSLTEAQNKLEKVIKTVLTDGDTSNNSFLPPSETQLTENNSLEIEEQVYQYLQKT | |
| | TSARVSEIEVALGLNRVQTTNVLRSLLKQGHLKQQDNRFFAVNKQGELIQP* | |
| Planktothrix | MTTVLQARPKGFVNTPTIEQLTIRALRYLQSGFSLHLRGPAGTGKTTLAMHLADLL | 450 |
| rubescens_gvpN | NRPIVLIFGDDELKSSDLIGNQLGYTRKKVIDNFIHSVVKLEDELRQNWIDSRLTLAC | |
| | KEGFTLVYDEFNRSRPEVNNVLLSALEEKLLVLPPNNSRSEYIRVNPHFRAIFTSNPE | |
| | EYCGVYGTQDALLDRLITIDMPEPDDETQQEILIQKIGISPEDAKNIIEIVKIYLEITTQ | |
| | KKEIKPVQNGKAARPHIDKASGLRPGLIIAKICHEHDISIQENNQDFIKVCADILLSRT | |
| | NLSLTEAQNKLEKVIKTVLTDGDTSTNSFLPLSETQLTENNSLEIEEQVYQYLQKTTS | |
| | ARVSEIEVALGLNRVQTTNVLRSLLKQGHLKQQDNRFFAVNKQGELIQP* | |
| Psychromonas | MSIENLNNVSEIKIEQSDDDHIYPEASEDFVETPYIKEVTERAMLYLDAGYPVHFAG | 451 |
| ingrahamii 37_gvpN1 | PAGTGKTTLAFHIAALRQRPVTLIHGNHEFGTSDLIGKESGYRRHRVVDNYVHSVV | |
| | KEEEELQSLWSDNRLTTCCRNGDTLVYDEFNRSTPEANNVLLSILEEGILNLPSSRSD | |
| | GYLEVHPQFRAIFTSNPQEYAGTHATQDALVDRMITIMLHYPDRHTEVRVAIAKS | |
| | GINSDEAGSIVDIVNEFRELCGSKIVSSGPKTMPTVRASIAIARVLVQKGEHAFRDN | |
| | TFFHRICRDVLCMYTQQVSFSNRSVLDKQLEDLIMKFCPATYKSSGSKIRA* | |
| Psychromonas | MSINNLNISTIKIEQPENDNIYPEASAEFVQTPYIQEVTERALLYLDAGYPVHFAGPA | 452 |
| ingrahamii 37_gvpN2 | GTGKTTLAFHIAALRKRPVTLIHGNHEFGSSDLIGKESGYRRHRLVDNYVHSVMKE | |
| | EEELKSLWVDNRLTTCCRNGDTLVYDEFNRSTPEANNVLLSILEEGILNLPSLRSMG | |
| | DGYLEVHPSFRAIFTSNPQEYAGTHATQDALVDRMITIMLNYPDRDTEVRVAVAK | |
| | SGISNEEAGFIVDIVNEFRELSNHKSLSSGQKSMPTVRASIAISRVLIQKGEHAFRDN | |
| | VFFHRVCHDVLCMYIQKISPSNRSFLDKQLEVLIGKFCPAAKSALVPKVVK* | |
| Rhodobacter | MTIPRDLPWGDARTPLFEDEELRSLLDRAEIYLREGIAIHFRGPAGVGKTTLALHLA | 453 |
| capsulatus SB | QRFARPVTFFVGNDWLGRADIFGRDLGETVSTVQDHYISSVRRAERKSRIDWQEA | |
| 1003_gvpN | PLARAMRDGHVLVYDEFSRSRPEANAALLSVIEEGVLPLSDPAAGRSHIVAHPDFR | |
| | VILTSNPRDYVGVQAVPDALLDRMITFSLDGMSFETEVGIVATAARTDPADARAIC | |
| | ALIHLLRAEKPGTMEISMRSGIMIARLARAAGVAPDPADPVFVQICADVLGTRMR | |
| | GSDIDDVMALLLRPDPAPAACAGGAR* | |
| Rhodobacter | MTVLSPSLPHAAGIDAALVENPWLGLRRSGRYFQNAETEALFARALGYARAGVCV | 454 |
| sphaeroides | HLAGPAGLGKTTLALRIAQALGRPVAFMTGNEWLGSRDFIGGEIGQTVTSVVDRY | |
| 2.4.1_gvpN | IQSVRRTEQSARIDWKESILGQAMRCGQTFIYDEFTRASPEANAALLSVLEEGVLVS | |
| | TDGASRHQYIEAHPDFRVLLTSNPHEYQGVKAAPDALIDRMVTLRLEEPSAPTLAG | |
| | IVALRSGLDPATARRIVDLILSVQRSGEMQAPPSMRTAILVARLAAPLRLAGRLSDA | |
| | ALAEIAADVLRGRGLEADAAAFEAKLAAPTPGETAR* | |
| Serratia sp. ATCC | MIKQNTVSQYTVDDDLVVPEASEHFVATSYVNDIIERALVYLRAGYPVHFAGPSGI | 455 |
| 39006_gvpN | GKTTLAFHLAALWGRPVTMLQGNEEFVSSDLTGKDIGYRKSSLVDNYIHSVLKTEE | |
| | QMNRMWVDNRLTTACRNGDMLIYDEFNRSKAETNNVLLSVLSEGILNLPGLRGV | |
| | GEGYLDVHPEFRAIFTSNPEEYAGTHKTQDALMDRMITINIGLVDRDTELQILHAR | |
| | SELELKEAAYIVDIIRELRGNEHETKHGLRAGIAIAHILHQQGIKPRYGDKLFHAICYD | |
| | VLSMDAAKIQHAGRSIYREMVDGVIRKICPPIGSDTVKASTQKIKAVE* | |
| Stella vacuolata_ATCC- | MSTEPAPVMPPSTDIEFGSQRPARPKPAEALAVGYRLSARPAAPSTLTLRPRADFV | 456 |
| 43931_gvpN | ETDQVKDLTRRGLGFLRAGYPLHFRGPAGTGKTTLALHVAAQLGRPVIVITGDNEL | |
| | GTADLVGSQRGYHYRKVVDQFIHNVTKLEETANQRWTDHRLTTACREGYTLVYD | |
| | EFTRSRPETHNVLLGVFEEKILFLPAEAREECYIRVHPDFRAIFTSNPQEYAGVHASQ | |
| | DALADRLATIDVDYPNRAMELAVASARTGLAEAEAARIIDLVRAFRASGDYQQTPT | |
| | MRASLMIARVAAQEGLRISVDDPGFVQLCMDALESRIFSGARQEADARARHRVA | |
| | LLGLLATHCPSEAPVARVATVARAKRKSAS* | |
| Thiocapsa rosea strain | MSAKPLQDASEVSALNNDNVQPEASDTFVCTPSVEALAERASAYLQAGYPVHLA | 457 |
| DSM 235 | GPAGTGKTTLAFHAAAKRGRPVKLIHGNDELGLADMVGQDNGYRRNTLVDNYIH | |
| Ga0242571_11_gvpN | SVVKTQEEVRTFWIDNRVTTACLNGETLIYDEFNRSRPEVNNIFLSILGEGILNLPNR | |
| | RHQGAGYLEVHPEFRVIFTSNPEEYAGTHKTQDALMDRMITMKIGHYDRETEIRV | |
| | TRAKSGLPPSEVAIVVDIVRELRGQSVNHHRPTLRACIAIARIMADRRISARSNNSF | |
| | FRDICRDILDMDSAKVRRDGNALGESPVDDVVASISARARRPKIVEPKGLHKEI* | |
| Tolypothrix sp. PCC | MTNTENHKKRAVLRVRPGQFVVTPAIEKVAIRALRYLTSGFAIHLRGPAGTGKTTL | 458 |
| 7601_gvpN | AMHLANCLDRPIMLIFGDDEFKSSDLIGSESGYTHKKLLDNYIHNVLKVEDELKQN | |
| | WVDSRLTLACREGLTLVYDEFNRSRPEVNNVLLSALEEKILTLPPSSNQPEYLHVHP | |
| | KFRAIFTSNPEEYCGVHSTQDALMDRLVTINMPEPDEQTQIEILTHKTGIHHEYAQ | |
| | LIARLVKAFRSATGAEKTSGLRSCLMVAKVCAEHDILVTPENTDFREICADVLFNRT | |
| | NLSASDATTLFLELLNHVQVKPVEPVDDSDPYDVAEAEIVGAAEPQTDAIAEPVTL | |
| | DESLLSDQPN* | |
| Trichodesmium | MTTVLNVSPDRFVSTPGVERVTQRASRYLESGYSVHLRGPAGVGKTTLALHLAHL | 459 |
| erythraeum | RQQPIFLMIGDDEFKTSDLIGNKSGYTRKKLVDNYIHTVLKVEDELRDNWIDSRLTL | |
| IMS101_gvpN1 | ACKEGFTLIYDEFNRSRPEVNNVLLSVLEEKMLVLPPSQNQSEYIQVHPQFRVILTS | |
| | NSEEWTGVHATQDALLDRVVTIGMEQPDISTEQNIVIQKTGINPLKAEVIIKLVRSV | |
| | RQRVDKEDLGSLRSALMISKVCHDHDIPLDGKDSSFSDLCADILISRPNLPRQEALQ | |
| | QLDEVLEEFFPADQPSSSDVGLEKEGSL* | |
| Trichodesmium | MTTVLNVSPDRFVSTPSVERVTQRASRYLESGYSVHLRGPAGVGKTTLALHLAHLR | 460 |
| erythraeum | QQPIFLMIGDDEFKTSDLIGNKSGYTRKKLVDNYIHTVLKVEDELKHNWIDSRLTLA | |
| IMS101_gvpN2 | CKEGFTLIYDEFNRSRPEVNNVLLSVLEEKMLVLPPSQNQSEYIQVHPQFRVILTSN | |
| | SEEWTGVHATQDALLDRVVTIGMGQPDISTEQNIIIQKTGINPLKAEVIIKLVRSVR | |
| | ERLETEDLGSLRSALMISKVCHDHDIPLGGKDSNFSDLCADILISRANLPRQEALKQL | |
| | DEVLEELFPADQLSISDIGLKKEGSL* | |
| gvpV | | |
| Anabaena-flos- | MIKNIQVFFMKTISNRSISRAKISTMPRPKSDASSQLDLYKMVTEKQRIQRDMYSIK | 461 |
| aquae_gvpV | ERMGLLQQRLDILNQQIEATEKTIHKLRQPHSNTAQNIVRSNIFVESNNYQTFEVE | |
| | Y* | |
| Aphanizomenon flos- | MKSFRHRSIIRAKISTMPRHISEASSQLELYKMVAEKQRISRELSSIKERMATLQKRL | 462 |
| aquae NIES-81_gvpV | DSLNNEIDNTEKTIHKLRQPHSSTAQNIVRSKNVVESNNYQTFEIEY* | |
| Arthrospira platensis | MRYKYHRQIQPKLSAIPRQKSQANLYRNSYLLAVEKKRLTEELEVLQSRSHIIEQRLA | 463 |
| NIES-39_gvpV | LIEDQLGELEKDVTQLSVPPSPKPQNNLPVNNPEPPPQSNPTNSSHINTFMVDY* | |
| Burkholderia | MPIPKKGLHDIRFRHAPGATPLPVHSMYMRISCIEMEKSRRTIERRAAQRRIAAVD | 464 |
| thailandensis sp. | SRVADLEREKARLYAAIDNEAPQAGDIRGSFRIRY* | |
| Bp5365 strain | | |
| MSMB43_gvpV | | |
| Desulfobacterium | MLKNRNRSIKGVQNIKTHAGKVDHVSHPHMAYMRISCLEMEKARKNKEKSGAQ | 465 |
| vacuolatum_DSM | KRIDMINQRLMEIEKEKAHIQRILGDTSIALESSNVDHDSEIKGGFKIKY* | |
| 3385_gvpV | | |
| Desulfomonile tiedjei | MNIRMKGNSRGLRDIRTHSGKVDRVGLPYMAYMSISCLEMEKARREKERLSALTR | 466 |
| DSM 6799_gvp | VIKNIEQRIREIEAEKDLLLKGVGERTRTDLQKASTPRDQSAQCKGGFKIRY* | |
| Legionella drancourtii | MMPALVKGLRNIKTMSNRLDKVQSPHEAFISAAALHREKQRHLQELAILRNRLDEI | 467 |
| LLAP12_gvpV | NLRLEQINEQQNQVAEAFDISPPRAVKSALRTGIQSKTGSTSHGFKIKY* | |
| Microcystis aeruginosa | MTTTRPPRPIRSKISTMPRKQSEADHQLELYKLITEKQRIQEKLEMMERQIQQLKN | 468 |
| NIES-843_gvpV | RLTFVTEQIETTEQSIQNLRTANPPSVAKKPDSPKTVAHSSNNSSNFQTFYLEY* | |
| Nostoc punctiforme | MHRTPNRRQIQAKLSTMPPQRSQATVYLNAYKMMLEKERLEEELEKLEARRHQI | 469 |
| ATCC 29133_gvpV | QQRLAILNSQTIPEENMTHQQANTDLENNTPKFNTLTLEY* | |
| Nostoc sp. PCC | MLSIIQVFPMTKVRNRGIIRPKITTMPRNKSEASSQLELYKLVTEQQRIKQELAFIEQ | 470 |
| 7120_gvpV | RTVLLKQRLSTLKTQIEGTERSINHLRHSELKYSRIALPKIFSETNNYQAFDIEY* | |
| Planktothrix agardhii | MRPFRSQPPILPKISTMPRQKTEATLYRSLYQLAVEKKRLQEELESLGQRFETVTQR | 471 |
| str. 7805_gvpV | LQQIETQIQGLETDVKQIAPPKPPETKPNQPSTPTPTKAEPGSVSTFTLDY* | |
| Psychromonas | MTAAKRKTLRGLADIRTISSCGTSGQEAYQMYLKRGVLEMEKLRRQKEKNSALER | 472 |
| ingrahamii 37_gvpV1 | VTNINRRLMAIDTDIDFLCQSLKVIEKRTNQENSIVEKSVSRGFKLRY* | |
| Psychromonas | MIFSKKKNALRGLADIRTLSGCGTSGQEAYQMYLKRGVLEMEKLRRQKEKNSALE | 473 |
| ingrahamii 37_gvpV2 | RVRNINYRLMAIDADIDFLCQSLKVIEERTNKENSISNESVTYKKGFKLRY* | |
| Serratia sp. ATCC | MAISTRPLRTLSDIKTHSGRVSGEHQTYRDYFQIGALELERWRRTREREAASSRIASI | 474 |
| 39006_gvpV | DERIADIDKEKAALLADATAASAVAENNDKSEAAEKKKKSSGLRIKY* | |
| Thiocapsa rosea strain | MSKFTQPSRSVRDIKTLAGMADDVRAPHKMYMRLFALETERHRRLQERASAMLR | 475 |
| DSM 235 | VDNIDARCAEIAEEMEQLLQILGVEAVAPGGPPANARPGSGRVPTQPHRGRGKG | |
| Ga0242571_11_gvpV | TGAGRQTTSGETSVGEAVKIRY* | |
| gvpW | | |
| Anabaena-flos- | MELENLYTYAFLEIPSSPLILPQGAANQVVLINGTELAAIVEPGIFLESFQNNDEKIIQ | 476 |
| aquae_gvpW | MALSHDRVICELFQQITVLPLRFGTYFTSTNNLLNHLKSHEKEYQNKLEKINGKNEF | |
| | TLKLIPRMIEEIVPSEGGGKDYFLAKKQRYQNQNNFSIAQAAEKQNLIDLITKVNQL | |
| | PVVVQEQEEQIQIYLLVSCQDKTLLLEQFLTWQKACPRWDLLLGDCLPPYHFI* | |
| Aphanizomenon flos- | MELENLYTYAFLKTPSFSLHLPQGSTTSVIQIDGNGLSAIVEPGISLDSFQDDDEKIV | 477 |
| aquae NIES-81_gvpW | QMAIEHDRVICDIFRQITVLPLRFGTYFANTDNLLTHLESYGQEYLDKLEKINCKTEFI | |
| | LKLIPRMITEESPVLESGRHYFLAKKQHYQRQKNFILAQASEKEILINFISKINQIPVII | |
| | QEQEEEVRIYLLVNYQDKTLLLEQFLTWQQTCPRWDLFLGEGIPPYHFI* | |
| Arthrospira platensis | MYVYAFIKSQSISWKSVQGIYEPVVLLEAGALAAVVEPNLQAENLSADNEEELMR | 478 |
| NIES-39_gvpW | AVLTHDRIVCQIFEETTVLPVRFGTCFDSEARLCEHLTTEGDRYFRQLEKLTGRAEYL | |
| | LEAIPQPFNQEKPSSDTTAPPTKGRDYFLQKKRLHQQRLNFEQQQEQQWQDFIN | |
| | AIASKYPIVQGKATEDAERIYLLIPRSQEVALVEWVAQQQQNIDLWEFSLGNAVPA | |
| | YHFL* | |
| Dolichospermum | MKLENFYTYAFLEIPRFPLVLPQGAASQVILINGSGMSAIVEPGISLESFQNNDEKII | 479 |
| circinale_gvpW | QMALSHDRVICELFQQVTVLPLRFGTCFTSTNNLLNYLELHRQEYQEKLEKINGKIE | |
| | FTLKLIPQTMEEPAPLERGGRDYFLAKKQRYQDQNNFRIAQAAEKQNLIDSISKVN | |
| | QLPFVIQEKEEEVNIYLLVKSEDKTLLLEQFLNWQKACPRWDLLLGEPLPPYHFI | |
| Microcystis aeruginosa | MKLYNLYTYAFLKTPIESLKLPVGMANPLLLITGGELSAVVEPEVGLDTLQNDDERLI | 480 |
| NIES-843_gvpW | QSVLCHDRVICQLFQQTTILPLRFGTSFLEAENLLTHLCSHGQEYQEKIEELEGKGEY | |
| | LLKCIPRKPEEPVLFSESKGRQYFLAKKQLYEAQQDFYTLQGSEWQNLVNLITQSYP | |
| | STRIITAPGTESRIYLLVNLQEEPLLIEQVLHWQKACPRWELQLGQVSPPYHFT* | |
| Nostoc punctiforme | MSIYAYALLVPTASPLVLPLGMERNTELVYSSGLAALVEPEISLEAIQATDERLLQAV | 481 |
| ATCC 29133_gvpW | LNHDHVIRELFQQTPLLPLRFGRGFTSVEKLLNHLENHQEQYLETLTQLADKVEYSV | |
| | KVTACSLLDDSDTIDARGKAYLLAKKQRYQTQQAFQAQQCEQWELLNELILKTYT | |
| | NVICETRQSDVRQIHFLAQRNDSTLSTQLFSLWQVQCSHWQLALSEPLPPYHFLK | |
| | NTLI* | |
| Nostoc sp. PCC | MRSPNFYTYAFLNTPDIPLRLPSGNLGQLLLIHGHKLSAVVEPGISLESSQNNDEEVI | 482 |
| 7120_gvpW | KMVLAHDRVICELSQQTTVLPLRFGTYFNSEETLLNHIESHAQEYQKKLDHIQGKTE | |
| | YTLKLIPRKFEELAKVSGGNGRDYFLAKKLHYEHQKNFIGDQNREKNHLINLIMDVY | |
| | RSSAIIQDYVEEVRLHLLVDRHDKTLLFKQVLTLQEKCPHWNLILGEPLPPYHFV* | |
| gvpR | | |
| Bacillus- | MEIKKIMQAVNDFFGEHVAPPHKITSVEATEDEGWRVIVEVIEEREYMKKYAKDE | 483 |
| megaterium_gvpR | MLGTYECFVNKEKEVISFKRLDVRYRSAIGIEA* | |
| gvpS | | |
| Bacillus- | MSLKQSMENKDIALIDILDVILDKGVAIKGDLIISIAGVDLVYLDLRVLISSVETLVQA | 484 |
| megaterium_gvpS | KEGNHKPITSEQFDKQKEELMDATGQPSKWTNPLGS* | |
| Rhodococcus hoagii | MSATPDRRIALVDLLDRVLGGGVVVAGEITLSIADVDMVHISLRTLVSSVSALTRPP | 485 |
| 103S_gvpS | DEKPENDG* | |
| gvpT | | |
| Bacillus- | MATETKLDNTQAENKENKNAENGSKEKNGSKASKTTSSGPIKRAVAGGIIGATIGY | 486 |
| megaterium_gvpT | VSTPENRKSLLDRIDTDELKSKASDLGTKVKEKSKSSVASLKTSAGSLFKKDKDKSKD | |
| | DEENVNSSSSETEDDNVQEYDELKEENQTLQDRLSQLEEKMNMLVELSLNKNQD | |
| | EEAEDTDSDEEENDENDENDENEQDDENEEETSKPRKKDKKEAEEEESESDEDSE | |
| | EEEEDSRSNKKNKKVKTEEEDEDESEEEKKEAKPKKSTAKKSKNTKAKKNTDEEDD | |
| | EATSLSSEDDTTA* | |
| gvpU | | |
| Bacillus- | MSTGPSFSTKDNTLEYFVKASNKHGFSLDISLNVNGAVISGTMISAKEYFDYLSETF | 487 |
| megaterium_gvpU | EEGSEVAQALSEQFSLASEASESNGEAEAHFIHLKNTKIYCGDSKSTPSKGKIFWRG | |
| | KIAEVDGFFLGKISDAKSTSKKSS* | |

TABLE 15
Protein sequences of gypC from exemplary species:

| | UniProt | | SEQ |
|---|---|---|---|
| Species | ID No. | Amino acid Sequence | ID NO: |
| Anabaena flos- | P09413 | MISLMAKIRQEHQSIAEKVA | 488 |
| aquae | | ELSLETREFLSVTTAKRQEQ | |
| | | AEKQAQELQAFYKDLQETSQ | |
| | | QFLSETAQARIAQAEKQAQE | |
| | | LLAFHKELQETSQQFLSATA | |
| | | QARIAQAEKQAQELLAFYQE | |
| | | VRETSQQFLSATAQARIAQA | |
| | | EKQAQELLAFHKELQETSQQ | |
| | | FLSATADARTAQAKEQKESL | |
| | | LKFRQDLFVSIFG | |
| Halobacterium | P24574 | MSVTDKRDEMSTARDKFAES | 489 |
| salinarum | | QQEFESYADEFAADITAKQD | |
| | | DVSDLVDAITDFQAEMTNTT | |
| | | DAFHTYGDEFAAEVDHLRAD | |
| | | IDAQRDVIREMQDAFEAYAD | |
| | | IFATDIADKQDIGNLLAAIE | |
| | | ALRTEMNSTHGAFEAYADDF | |
| | | AADVAALRDISDLVAAIDDF | |
| | | QEEFIAVQDAFDNYAGDFDA | |
| | | EIDQLHAAIADQHDSFDATA | |
| | | DAFAEYRDEFYRIEVEALLE | |
| | | AINDFQQDIGDFRAEFETTE | |
| | | DAFVAFARDFYGHEITAEEG | |
| | | AAEAEAEPVEADADVEAEAE | |
| | | VSPDEAGGESAGTEEEETEP | |
| | | AEVETAAPEVEGSPADTADE | |
| | | AEDTEAEEETEEEAPEDMVQ | |
| | | CRVCGEYYQAITEPHLQTHD | |
| | | MTIQEYRDEYGEDVPLRPDD | |
| | | KT | |
| Halobacterium | Q02228 | MSVKDKREKMTATREEFAEV | 490 |
| mediterranei | | QQAFAAYADEFAADVDDKRD | |
| | | VSELVDGIDTLRTEMNSTND | |
| | | AFRAYSEEFAADVEHFHTSV | |
| | | ADRRDAFDAYADIFATDVAE | |
| | | MQDVSDLLAAIDDLRAEMDE | |
| | | THEAFDAYADAFVTDVATLR | |
| | | DVSDLLTAISELQSEFVSVQ | |
| | | GEFNGYASEFGADIDQFHAV | |
| | | VAEKRDGHKDVADAFLQYRE | |
| | | EFHGVEVQSLLDNIAAFQRE | |
| | | MGDYRKAFETTEEAFASFAR | |
| | | DFYGQGAAPMATPLNNAAET | |
| | | AVTGTETEVDIPPIEDSVEP | |
| | | DGEDEDSKADDVEAEAEVET | |
| | | VEMEFGAEMDTEADEDVQSE | |
| | | SVREDDQFLDDETPEDMVQC | |
| | | LVCGEYYQAITEPHLQTHDM | |
| | | TIKKYREEYGEDVPLRPDDK | |
| | | A | |
| Microchaete | P08041 | MTPLMIRIRQEHRGIAEEVT | 491 |
| diplosiphon | | QLFKDTQEFLSVTTAQRQAQ | |
| | | AKEQAENLHQFHKDLEKDTE | |
| | | EFLTDTAKERMAKAKQQAED | |
| | | LFQFHKEMAENTQEFLSETA | |
| | | KERMAQAQEQARQLREFHQN | |
| | | LEQTTNEFLADTAKERMAQA | |
| | | QEQKQQLHQFRQDLFASIFG | |
| | | TF | |
| Nostoc sp. | Q8YUS9 | MTALMVRIRQEHRSIAEEVT | 492 |
| | | QLFRETHEFLSATTAHRQEQ | |
| | | AKQQAQQLHQFHQNLEQTTH | |
| | | EFLTETTTQRVAQAEAQANF | |
| | | LHKFHQNLEQTTQEFLAETA | |
| | | KNRTEQAKAQSQYLQQFRKD | |
| | | LFASIFGTF | |

TABLE 16
Amino acid sequences of exemplary GVS and
GVA proteins from B. megaterium.

| GVA | | SEQ ID |
|---|---|---|
| Protein | Amino acid sequence | NO.: |
| gvpB | MSIQKSTNSSSLAEVIDRILDKGIVIDAF | 493 |
| | ARVSVVGIEILTIEARVVIASVDTWLRYA | |
| | EAVGLLRDDVEENGLPERSNSSEGQPRFS | |
| | I | |
| gvpR | MEIKKIMQAVNDFFGEHVAPPHKITSVEA | 494 |
| | TEDEGWRVIVEVIEEREYMKKYAKDEMLG | |
| | TYECFVNKEKEVISFKRLDVRYRSAIGIE | |
| | A | |
| gvpN | MTVLTDKRKKGSGAFIQDDETKEVLSRAL | 495 |
| | SYLKSGYSIHFTGPAGGGKTSLARALAKK | |
| | RKRPVMLMHGNHELNNKDLIGDFTGYTSK | |
| | KVIDQYVRSVYKKDEQVSENWQDGRLLEA | |
| | VKNGYTLIYDEFTRSKPATNNIFLSILEE | |
| | GVLPLYGVKMTDPFVRVHPDFRVIFTSNP | |
| | AEYAGVYDTQDALLDRLITMFIDYKDIDR | |
| | ETAILTEKTDVEEDEARTIVTLVANVRNR | |
| | SGDENSSGLSLRASLMIATLATQQDIPID | |
| | GSDEDFQTLCIDILHHPLTKCLDEENAKS | |
| | KAEKIILEECKNIDTEEK | |
| gvpF | MSETNETGIYIFSAIQTDKDEEFGAVEVE | 496 |
| | GTKAETFLIRYKDAAMVAAEVPMKIYHPN | |
| | RQNLLMHQNAVAAIMDKNDTVIPISFGNV | |
| | FKSKEDVKVLLENLYPQFEKLFPAIKGKI | |
| | EVGLKVIGKKEWLEKKVNENPELEKVSAS | |
| | VKGKSEAAGYYERIQLGGMAQKMFTSLQK | |
| | EVKTDVFSPLEEAAEAAKANEPTGETMLL | |
| | NASFLINREDEAKFDEKVNEAHENWKDKA | |
| | DFHYSGPWPAYNFVNIRLKVEEK | |
| gvpG | MLHKLVTAPINLWKIGEKVQEEADKQLYD | 497 |
| | LPTIQQKLIQLQMMFELGEIPEEAFQEKE | |
| | DELLMRYEIAKRREIEQWEELTQKRNEES | |
| gvpL | MGELLYLYGLIPTKEAAAIEPFPSYKGFD | 498 |
| | GEHSLYPIAFDQVTAVVSKLDADTYSEKV | |
| | IQEKMEQDMSWLQEKAFHHHETVAALYEE | |
| | FTIIPLKFCTIYKGEESLQAAIEINKEKI | |
| | ENSLTLLQGNEEWNVKIYCDDTELKKGIS | |
| | ETNESVKAKKQEISHLSPGRQFFEKKKID | |
| | QLIEKELELHKNKVCEEIHDKLKELSLYD | |
| | SVKKNWSKDVTGAAEQMAWNSVFLLPSLQ | |
| | ITKFVNEIEELQQRLENKGWKFEVTGPWP | |
| | PYHFSSFA | |
| gvpS | MSLKQSMENKDIALIDILDVILDKGVAIK | 499 |
| | GDLIISIAGVDLVYLDLRVLISSVETLVQ | |
| | AKEGNHKPITSEQFDKQKEELMDATGQPS | |
| | KWTNPLGS | |
| gvpK | MQPVSQANGRIHLDPDQAEQGLAQLVMTV | 500 |
| | IELLRQIVERHAMRRVEGGTLTDEQIENL | |
| | GIALMNLEEKMDELKEVFGLDAEDLNIDL | |
| | GPLGSLL | |
| gvpJ | MAVEHNMQSSTIVDVLEKILDKGVVIAGD | 501 |
| | ITVGIADVELLTIKIRLIVASVDKAKEIG | |
| | MDWWENDPYLSSKGANNKALEEENKMLHE | |
| | RLKTLEEKIETKR | |
| gvpT | MATETKLDNTQAENKENKNAENGSKEKNG | 502 |
| | SKASKTTSSGPIKRAVAGGIIGATIGYVS | |
| | TPENRKSLLDRIDTDELKSKASDLGTKVK | |
| | EKSKSSVASLKTSAGSLFKKDKDKSKDDE | |
| | ENVNSSSSETEDDNVQEYDELKEENQTLQ | |
| | DRLSQLEEKMNMLVELSLNKNQDEEAEDT | |
| | DSDEEENDENDENDENEQDDENEEETSKP | |
| | RKKDKKEAEEEESESDEDSEEEEEDSRSN | |
| | KKNKKVKTEEEDEDESEEEKKEAKPKKST | |
| | AKKSKNTKAKKNTDEEDDEATSLSSEDDT | |
| | TA | |
| gvpU | MSTGPSFSTKDNTLEYFVKASNKHGFSLD | 503 |
| | ISLNVNGAVISGTMISAKEYFDYLSETFE | |
| | EGSEVAQALSEQFSLASEASESNGEAEAH | |
| | FIHLKNTKIYCGDSKSTPSKGKIFWRGKI | |
| | AEVDGFFLGKISDAKSTSKKSS | |

TABLE 17
Amino acid sequences of exemplary GVS and GVA proteins from Serratia sp..

| GVA | | SEQ ID |
|---|---|---|
| Protein | Amino acid sequence | NO.: |
| gvpA1 | MAKVQKSTDSSSLAEVVDRILDKGIVIDAWVKVSLVGIELLSIEARVVIASVETYLKYAEAIGLT | 504 |
| | ASAATPA | |
| gvpA2 | MPVNKQYQDEQQQVSLCEALDRVLNKGVVIVADITISVANIDLIYLSLQALVSSVEAKNRLPGRE | 505 |
| gvpA3 | MPVNKQYQDEQQQVSLCEALDRVLNKGVVIVADITISVANIDLIYLSLQALVSSVEAKNRLPGRE | 506 |
| gvpC | MGCLTDGMAQLRKNIDDSHESRIAQQNARVSSVSAQIAGFSTTRARNAAQDARARATFVADNVR | 507 |
| | GVNRMLSDFCHTREVMSRQQSEERATFVTDMSKKTLALLDGFNAERKSMAERCAKERADFIANV | |
| | ANDVAAFLSASEKDRMAAHAVFFGMTLAKKKTSLAV | |
| gvpN | MIKQNTVSQYTVDDDLVVPEASEHFVATSYVNDIIERALVYLRAGYPVHFAGPSGIGKTTLAFHL | 508 |
| | AALWGRPVTMLQGNEEFVSSDLTGKDIGYRKSSLVDNYIHSVLKTEEQMNRMWVDNRLTTACRNG | |
| | DMLIYDEFNRSKAETNNVLLSVLSEGILNLPGLRGVGEGYLDVHPEFRAIFTSNPEEYAGTHKTQ | |
| | DALMDRMITINIGLVDRDTELQILHARSELELKEAAYIVDIIRELRGNEHETKHGLRAGIAIAHI | |
| | LHQQGIKPRYGDKLFHAICYDVLSMDAAKIQHAGRSIYREMVDGVIRKICPPIGSDTVKASTQKI | |
| | KAVE | |
| gvpV | MAISTRPLRTLSDIKTHSGRVSGEHQTYRDYFQIGALELERWRRTREREAASSRIASIDERIADI | 509 |
| | DKEKAALLADATAASAVAENNDKSEAAEKKKKSSGLRIKY | |
| gvpF1 | MMSIDKSRNHRAKVLYALCVSDDSTPNYKIRGLEAAPVYSIDQDGLRAVVSDTLSTRLRPERRNI | 510 |
| | TAHQAVLHKLTEEGTVLPMRFGVIARNAEAVKNLLVANQDTIREHFERLDGCVEMGLRVSWDVTN | |
| | IYEYFVATYPVLSETRDEIWNGNSNANNHREEKIRLGNLYESLRSGDRKESTEKVKEVLLDYCEE | |
| | IIENPVKKEKDVMNLACLVARERMDEFAKGVFEASKLFDNVYLFDYTGPWAPHNFVTLDLHAPTA | |
| | KKKTLTRAGTLSD | |
| gvpF2 | MTMNTEAQTEQAIYLYGLTLPDLAAPPILGVDNQHPINTHQCAGLNAVISPVALSDFTGEKGEDN | 511 |
| | VQNVTWLTPRICRHAQIIDSLMAQGPVYPLPFGTLFSSQNALEQEMKSRATDVFVSLRRITGCQE | |
| | WALEATLDRKQAVDVLFTEGLDSGRFCLPEAIGRRHLEEQKLRRRLTTELSDWLAHALTAMQNEL | |
| | HPLVRDFRSRRLLDDKILHWAYLLPVEDVAAFQQQVADIVERYEAYGFSFRVTGPWAAYSFCQPD | |
| | ES | |
| gvpF3 | MSLLLYGIVAEDTQLALEPDGSPHAGEEPMQLVKAATLAALVKPCEADVSREPAAALAFGQQIMH | 512 |
| | VHQQTTIIPIRYGCVLADEDAVTQHLLNHEAHYQTQLVELENCDEMGIRLSLASAEDNAVTTPQA | |
| | SGLDYLRSRKLAYAVPEHAERQAALLNNAFTGLYRRHCAEISMFNGQRTYLLSYLVPRTGLQAFR | |
| | DQFNTLANNMTDIGVISGPWPPYNFAS | |
| gvpG | MLLIDDILFSPVKGVMWIFRQIHELAEDELAGEADRIRESLTDLYMLLETGQITEDEFEQQEAVL | 513 |
| | LDRLDALDEEDDMLGDEPGDDEDDEYEEDDDEEDDDEEDDDDEDDDDEDDDDEEDDDDDEDDDDE | |
| | DEPEGTTK | |
| gvpW | MKPAIYPKFLLESPLKLVFFGGKGGVGKSTCATSTALRLAQEQPQHHFLLVSTDPAHSLQNILSD | 514 |
| | LVLPKNLDVRELNAAASLHEFKSQHEGVLKEIAYRGTVLDQNDVQGLMDTALPGMDELAAYLEIA | |
| | EWIQKDTYYRIIIDTAPTGHTLRLLEMPDLIYRWLTALDTLLAKQRYIRKRFAGDNRLDHLDHFL | |
| | LDMNDSLKAMHELVTDSTRCCFVLVMLAEAMSVEESIDLAGALNQQRVFLSDLVVNRLFPENDCP | |
| | TCCVERNRQMLALQNGYQRLPGHVFWTLPLLAIEPRGALLHEFWSGVRLLDENEVMATTCHHQLP | |
| | LRVESSISLPASTFRLLIFAGKGGVGKTTLACATALRLNSEYPELRILLFSADPAHSLSDCLGVT | |
| | LQQQPISVLVNIDAQEINAQADFDKIRQGYRAELEAFLLDTLPNLDITFDREVLEHLLDLAPPGL | |
| | DEIMALTAIMDHLDSGRYDMVIVDGAPSGHLLRLLELPELIRDWLKQFFSLLLKYRKVMRFPHLS | |
| | ERLVQLSRELKNLRALLQDTKQTGLYAVTVPTHLALEKTYEMTCALQRLGLTANALFINQITPPS | |
| | DCTLCQAITSRESLELKCADEMFPSQPHAQIFRQTEPTGLSKLKTLGSALFL | |
| gvpK | MTTNQLSHHSPVFGPTSPAIQRPITEANRHKIDIDGERVRDGLAQLVLTLVKLLHELLERQAIRR | 515 |
| | MDSGSLSDEEVERLGLALMRQAEELTHLCDVFGFKDDDLNLDLGPLGRLL | |
| gvpX | MVNTTNDINAATRGLLLRMGNAWFEQDELRQAVDIYLKIIEQYPDSKESKTAQTALLTISQRYER | 516 |
| | DGLFRLSLDILERVGEITPTSI | |
| gvpY | MRALIHFPIIHSPKDLGTLSEAASHLRTETQTRAYLAAVEGFWTMITTTIEGLDLDYTHLKLYQD | 517 |
| | GLPVCGKENEIVTDVANAGSQNYKLLLTLQHKGAILMGTESPELLLQERDLMTQLLQSTEQTEAS | |
| | LETAKTLLNRRDDYIAQRIDETLQDGEMAILFLGLMHNIEAKLPADIVFIQPLGKPPGGESI | |
| gvpH | MTGNVEGILRGLGDLVEKLVETGEQIKRSGAFDIDTNDGKNAKAVYGFSIKMGLDGNQENRVEPF | 518 |
| | GNIRRDEQTGEATVQEVSEPLVDVIEESDHVLVLAEMPGVADEDVQVELNGDILTLHSERGSKKY | |
| | HKEIVLPCSFDDKAMERSCRNGILEVKLGK | |
| gvpZ | MSEELKLKVAEALPKDAGRGYARLDPADMARLNLAVGDIVQLTSKKGTGIAKLMPTYPDMRNKGI | 519 |
| | VQLDGLTRRNTSLSLDEKVQIEPASCKHATQIVLIPTTITPNQRDLDYIGSLLDGLPVQKGDLLR | |
| | AHLFGSRSADFKVESTIPDGAVLIDPTTTLVIGKSNAVGNSSHSTQRLSYEDVGGLKNQVRRIRE | |
| | MIELPLRYPEVFERLGIDAPKGVLLSGPPGCGKTLIARIIAQETDAQFFTISGPEIVHKFYGESE | |
| | AHLRKIFEEAGRKGPSIIFLDEIDSIAPHRDKVVGDVEKRIVAQLLALMDGLKNRGKVIVIAATN | |
| | LPNAIDPALRRPGRFDREISIPIPDREGRREIIEIHSTGMPLNADVDLNVLADITHGFVGADLEA | |
| | LCREAAMSALRRLLPEIDFSSAELPYDRLAELTVMMDDFRAALCEVSPSAIRELFVDIPDVRWED | |
| | VGGLDDVRRRLIESVEWPIKYPELYEQAGVKPPKGLLLAGPPGVGKTLIAKAVANESGVNVISVK | |
| | GPALMSRYVGDSEKGVRELFLKARQAAPCIIFLDEVDSVIPARNEGAIDSHVAERVLSQFLSEMD | |
| | GLEELKGVFVMGATNRADLIDPAMLRPGRFDEIIELGLPDEDARRQILAVHLRNKPLGDNIHADD | |
| | LAERCDGASGAELAAVCNRAALAALRRAIQQSEEAVLSPSTVGETPVALTVRIEQHDFAEVIAEM | |
| | FGDDA | |

TABLE 18
Amino Acid Sequences of GV proteins
from Anabaena flos-aquae

| gyp | | SEQ ID |
|---|---|---|
| gene | Sequence | NO: |
| gvpA | MAVEKTNSSSSLAEVIDRILDKGIVIDAWVRVSLV | 520 |
| | GIELLAIEARIVIASVETYLKYAEAVGLTQSAAVP | |
| | A | |
| gvpC | MISLMAKIRQEHQSIAEKVAELSLETREFLSVTTA | 521 |
| | QKRQEQAEKQAQELQAFYKDLQETSQQFLSETAAR | |
| | IAQAEKQAQELLAFHKELQETSQQFLSATAQARIA | |
| | QAEKQAQELLAFYQEVRETSQQFLSATAQARIAQA | |
| | EKQAQELLAFHKELQETSQQFLSATADARTAQAKE | |
| | QKESLLKFRQDLFVSIFG | |
| gvpN | MTTTKVNHKRAVLRLRPGQFVVTPAIERVAIRALR | 522 |
| | YLKSGFPVHLRGPAGTGKTTLAMHLANCLDRPVML | |
| | LFGDDQFKSSDLIGSESGYTHKKVLDNYIHSVVKL | |
| | EDEFKQNWVDSRLTLACREGFTLVYDEFNRSRPEV | |
| | NNVLLSALEEKILSLPPSSNQPEYLSVNPQFRVIF | |
| | TSNPEEYAGVHSTQDALMDRLVTISMPEPDEITQT | |
| | EILIQKTNIDRESANFIVRLVKSFRLATGAEKTSG | |
| | LRSCLMIAKVCADNNIPVTTESLDFPDIAIDILFN | |
| | RSHLSMSESTNIFLELLDKFSAEELEILNNRVTGD | |
| | NDFLIDNSQFVSQQLAGQPN | |
| gvpJ | MLPTRPQTNSSRTINTSTQGSTLADILERVLDKGI | 523 |
| | VIAGDISISIASTELVHIRIRLLISSVDKAKEMGI | |
| | NWWESDPYLSTKAQRLVEENQQLQHRLESLEAKLN | |
| | SLTSSSVKEEIPLAADVKDDLYQTSAKIPSPVDTP | |
| | IEVLDFQAQSSGGTPPYVNTSMEILDFQAQTSAES | |
| | SSPVGSTVEILDFQAQTSEESSSPVVSTVEILDFQ | |
| | AQTSEESSSPVGSTVEILDFQAQTSEEIPSSVDPA | |
| | IDV | |
| gvpK | MVCTPAENFNNSLTIASKPKNEAGLAPLLLTVLEL | 524 |
| | VRQLMEAQVIRRMEEDLLSEPDLERAADSLQKLEE | |
| | QILHLCEMFEVDPADLNINLGEIGTLLPSSGSYYP | |
| | GQPSSRPSVLELLDRLLNTGIVVDGEIDLGIAQID | |
| | LIHAKLRLVLTSKPI | |
| gvpF | MSIPLYLYGIFPNTIPETLELEGLDKQPVHSQVVD | 525 |
| | EFCFLYSEARQEKYLASRRNLLTHEKVLEQTMHAG | |
| | FRVLLPLRFGLVVKDWETIMSQLINPHKDQLNQLF | |
| | QKLAGKREVSIKIFWDAKAELQTMMESHQDLKQQR | |
| | DNMEGKKLSMEEVIQIGQLIEINLLARKQAVIEVF | |
| | SQELNPFAQEIVVSDPMTEEMIYNAAFLIPWESES | |
| | EFSERVEVIDQKFGDRLRIRYNNFTAPYTFAQLDS | |
| gvpG | MLTKLLLLPIMGPLNGVVWIAEQIQERTNTEFDAQ | 526 |
| | ENLHKQLLSLQLSFDIGEIGEEEFEIQEEEILLKI | |
| | QALEEEARLELEAEQEEARLELEAEQEDFEYPPQF | |
| | TAEVNKDQHLVLLP | |
| gvpV | MIKNIQVFFMKTISNRSISRAKISTMPRPKSDASS | 527 |
| | QLDLYKMVTEKQRIQRDMYSIKERMGLLQQRLDIL | |
| | NQQIEATEKTIHKLRQPHSNTAQNIVRSNIFVESN | |
| | NYQTFEVEY | |
| gvpW | MELENLYTYAFLEIPSSPLILPQGAANQVVLINGT | 528 |
| | ELAAIVEPGIFLESFQNNDEKIIQMALSHDRVICE | |
| | LFQQITVLPLRFGTYFTSTNNLLNHLKSHEKEYQN | |
| | KLEKINGKNEFTLKLIPRMIEEIVPSEGGGKDYFL | |
| | AKKQRYQNQNNFSIAQAAEKQNLIDLITKVNQLPV | |
| | VVQEQEEQIQIYLLVSCQDKTLLLEQFLTWQKACP | |
| | KWDLLLGDCLPPYHFI | |

[0403] Summary provided herein are engineered protease sensitive gas vesicles and related engineered protease genetically GvpCconstructs, vectors, gas vesicles gene clusters, genetic circuits, cells, compositions, methods and systems, which in several embodiments can be used together with contrast-enhanced imaging technique, to detect and report protease activity and related biological events in an imaging target site.

[0404] The examples set forth above are provided to give those of ordinary skill in the art a complete disclosure and description of how to make and use the embodiments of the hybrid GVGCs, and related GVR genetic circuits, vectors, genetically engineered prokaryotic cells, compositions, methods and systems of the disclosure, and are not intended to limit the scope of what the inventors regard as their disclosure. Those skilled in the art will recognize how to adapt the features of the exemplified hybrid GVGCs, and related genetic circuits, vectors, genetically engineered prokaryotic cells, compositions, methods and systems herein disclosed to additional hybrid GVGCs, and related genetic circuits, vectors, genetically engineered prokaryotic cells, compositions, methods and systems according to various embodiments and scope of the claims.

[0405] All patents and publications mentioned in the specification are indicative of the levels of skill of those skilled in the art to which the disclosure pertains.

[0406] The entire disclosure of each document cited (including patents, patent applications, journal articles, abstracts, laboratory manuals, books, or other disclosures) in the Background, Summary, Detailed Description, and Examples is hereby incorporated herein by reference. All references cited in this disclosure are incorporated by reference to the same extent as if each reference had been incorporated by reference in its entirety individually. However, if any inconsistency arises between a cited reference and the present disclosure, the present disclosure takes precedence. Further, the computer readable form of the sequence listing of the ASCII text file P2513-US-Sequence-Listing_ST25 is incorporated herein by reference in its entirety.

[0407] The terms and expressions which have been employed herein are used as terms of description and not of limitation, and there is no intention in the use of such terms and expressions of excluding any equivalents of the features shown and described or portions thereof, but it is recognized that various modifications are possible within the scope of the disclosure claimed. Thus, it should be understood that although the disclosure has been specifically disclosed by embodiments, exemplary embodiments and optional features, modification and variation of the concepts herein disclosed can be resorted to by those skilled in the art, and that such modifications and variations are considered to be within the scope of this disclosure as defined by the appended claims.

[0408] It is also to be understood that the terminology used herein is for the purpose of describing particular embodiments only, and is not intended to be limiting. As used in this specification and the appended claims, the singular forms “a,” “an,” and “the” include plural referents unless the content clearly dictates otherwise. The term “plurality” includes two or more referents unless the content clearly dictates otherwise. Unless defined otherwise, all technical and scientific terms used herein have the same meaning as commonly understood by one of ordinary skill in the art to which the disclosure pertains.

[0409] When a Markush group or other grouping is used herein, all individual members of the group and all combinations and possible sub-combinations of the group are intended to be individually included in the disclosure. Every combination of components or materials described or exemplified herein can be used to practice the disclosure, unless otherwise stated. One of ordinary skill in the art will appreciate that methods, system elements, and materials other than those specifically exemplified may be employed in the practice of the disclosure without resort to undue experimentation. All art-known functional equivalents, of any such methods, device elements, and materials are intended to be included in this disclosure. Whenever a range is given in the specification, for example, a temperature range, a frequency range, a time range, or a composition range, all intermediate ranges and all subranges, as well as, all individual values included in the ranges given are intended to be included in the disclosure. Any one or more individual members of a range or group disclosed herein may be excluded from a claim of this disclosure. The disclosure illustratively described herein suitably may be practiced in the absence of any element or elements, limitation or limitations which is not specifically disclosed herein.

[0410] A number of embodiments of the disclosure have been described. The specific embodiments provided herein are examples of useful embodiments of the disclosure and it will be apparent to one skilled in the art that the disclosure can be carried out using a large number of variations of the genetic circuits, genetic molecular components, and methods steps set forth in the present description. As will be obvious to one of skill in the art, methods and systems useful for the present methods and systems may include a large number of optional composition and processing elements and steps.

[0411] In particular, it will be understood that various modifications may be made without departing from the spirit and scope of the present disclosure. Accordingly, other embodiments are within the scope of the following claims.

### REFERENCES

[0412] 1. Tashiro, Y., et al., Molecular genetic and physical analysis of gas vesicles in buoyant enterobacteria. Environmental microbiology, 2016. 18(4): p. 1264-1276.
[0413] 2. Van Keulen, G., et al., Gas vesicles in actinomycetes: old buoys in novel habitats?Trends in microbiology, 2005. 13(8): p. 350-354.
[0414] 3. Walsby, A. E., Gas vesicles. Microbiol. Rev., 1994. 58(1): p. 94-144.
[0415] 4. Walsby, A. E., Gas-vacuolate bacteria (apart from cyanobacteria), in The Prokaryotes. 1981, Springer. p. 441-447.
[0416] 5. Walsby, A. E., Cyanobacteria: planktonic gas-vacuolate forms. The Prokaryotes, a Handbook on Habitats, Isolation, and Identification of Bacteria, 2013. 1: p. 224-235.
[0417] 6. Woese, C. R., Bacterial evolution. Microbiological reviews, 1987. 51(2): p. 221.
[0418] 7. Walsby, A. E., Gas vesicles. Microbiol Rev, 1994. 58(1): p. 94-144.
[0419] 8. Pfeifer, F., Distribution, formation and regulation of gas vesicles. Nat. Rev. Microbiol., 2012. 10(10): p. 705-15.
[0420] 9. Yi, G., S.-H. Sze, and M. R. Thon, Identifying clusters of functionally related genes in genomes. Bioinformatics, 2007. 23(9): p. 1053-1060.
[0421] 10. Bourdeau, R. W., et al., Acoustic reporter genes for noninvasive imaging of microorganisms in mammalian hosts. Nature, 2018. 553(7686): p. 86-90.
[0422] 11. Lakshmanan, A., et al., Preparation of biogenic gas vesicle nanostructures for use as contrast agents for ultrasound and MRI. Nat Protoc, 2017. 12(10): p. 2050-2080.
[0423] 12. Hayes, P. and R. Powell, The gvpA/C cluster of Anabaena flos-aquae has multiple copies of a gene encoding GvpA. Archives of microbiology, 1995. 164(1): p. 50-57.
[0424] 13. Kinsman, R. and P. Hayes, Genes encoding proteins homologous to halobacterial Gvps N, J, K, F &L are located downstream of gvpC in the cyanobacterium Anabaena flos-aquae. DNA Sequence, 1997. 7(2): p. 97-106.
[0425] 14. Myers, E. W. and W. Miller, Optimal alignments in linear space. Computer applications in the biosciences: CABIOS, 1988. 4(1): p. 11-17.
[0426] 15. Smith, T. F. and M. S. Waterman, Comparison of biosequences. Advances in applied mathematics, 1981. 2(4): p. 482-489.
[0427] 16. Needleman, S. B. and C. D. Wunsch, A general method applicable to the search for similarities in the amino acid sequence of two proteins. Journal of molecular biology, 1970. 48(3): p. 443-453.
[0428] 17. Pearson, W. R. and D. J. Lipman, Improved tools for biological sequence comparison. Proceedings of the National Academy of Sciences, 1988. 85(8): p. 2444-2448.
[0429] 18. Karlin, S. and S. F. Altschul, Methods for assessing the statistical significance of molecular sequence features by using general scoring schemes. Proceedings of the National Academy of Sciences, 1990. 87(6): p. 2264-2268.
[0430] 19. Karlin, S. and S. F. Altschul, Applications and statistics for multiple high-scoring segments in molecular sequences. Proceedings of the National Academy of Sciences, 1993. 90(12): p. 5873-5877.
[0431] 20. Lu, G. J., et al., Acoustically modulated magnetic resonance imaging of gas-filled protein nanostructures. Nat Mater, 2018. 17(5): p. 456-463.
[0432] 21. Maresca, D., et al., Nonlinear Ultrasound Imaging of Nanoscale Acoustic Biomolecules. Applied Physics Letters, 2017. 110(7).
[0433] 22. Maresca, D., et al., Nonlinear ultrasound imaging of nanoscale acoustic biomolecules. Appl Phys Lett, 2017. 110(7): p. 073704.
[0434] 23. David Maresca, D. P. S., Guillaume Renaud, Audrey Lee-Gosselin, and Mikhail G. Shapiro, Nonlinear X-Wave Ultrasound Imaging of Acoustic Biomolecules. Phys. Rev. X, 2018. 8(4): p. 041002.
[0435] 24. Collins, D. E. C. J. J., Tunable protein degradation in bacteria. Nature Biotechnology volume 2014. 32: p. 1276-1281.
[0436] 25. Hélene Chassin, M. M., Marcel Tigges, Leo Scheller, Moritz Lang & Martin Fussenegger, A modular degron library for synthetic circuits in mammalian cells. Nature Communications 2019. 10: p. 2013.
[0437] 26. Baker, R. T. S. a. T. A., AAA+Proteases: ATP-Fueled Machines of Protein Destruction. Annual Review of Biochemistry, 2011. 80: p. 587-612.
[0438] 27. al., H. C.-M. e., Modulation of SQSTM1/p62 activity by N-terminal arginylation of the endoplasmic reticulum chaperone HSPA5/GRP78/BiP. Autophagy, 2016. 12(2): p. 426-428.
[0439] 28. al., T. A. A. e., Systemic in vivo distribution of activatable cell penetrating peptides is superior to cell penetrating peptides. Integr Biol (Camb). 2009. 1(5-6): p. 371-381.
[0440] 29. al., L. Y. e., Quantitatively Visualizing Tumor-Related Protease Activity in Vivo Using a Ratiometric Photoacoustic Probe. J. Am. Chem. Soc., 2019. 141(7): p. 3265-3273.
[0441] 30. Zordan, R. E., et al., Avoiding the ends: internal epitope tagging of proteins using transposon Tn7. Genetics, 2015. 200(1): p. 47-58.
[0442] 31. Lakshmanan, A., et al., Molecular Engineering of Acoustic Protein Nanostructures. ACS Nano, 2016. 10(8): p. 7314-7322.
[0443] 32. Lakshmanan, A., et al., Preparation of biogenic gas vesicle nanostructures for use as contrast agents for ultrasound and MRI. Nature Protocols, 2017. 12(10): p. 2050.
[0444] 33. Pfeifer, F., Distribution, formation and regulation of gas vesicles. Nat Rev Microbiol, 2012. 10(10): p. 705-15.
[0445] 34. Li, N. and M. C. Cannon, Gas vesicle genes identified in Bacillus megaterium and functional expression in Escherichia coli. J Bacteriol, 1998. 180(9): p. 2450-8.
[0446] 35. Tashiro, Y., et al., Molecular genetic and physical analysis of gas vesicles in buoyant enterobacteria. Environ Microbiol, 2016. 18(4): p. 1264-76.
[0447] 36. Ramsay, J. P., et al., A quorum-sensing molecule acts as a morphogen controlling gas vesicle organelle biogenesis and adaptive flotation in an enterobacterium. Proc Natl Acad Sci USA, 2011. 108(36): p. 14932-7.
[0448] 37. Datsenko, K. A. and B. L. Wanner, One-step inactivation of chromosomal genes in Escherichia coli K-12 using PCR products. Proceedings of the National Academy of Sciences, 2000. 97(12): p. 6640-6645.
[0449] 38. St-Pierre, F., et al., One-step cloning and chromosomal integration of DNA. ACS synthetic biology, 2013. 2(9): p. 537-541.
[0450] 39. Phan, J., et al., Structural basis for the substrate specificity of tobacco etch virus protease. Journal of Biological Chemistry, 2002. 277(52): p. 50564-50572.
[0451] 40. Parks, T. D., et al., Release of proteins and peptides from fusion proteins using a recombinant plant virus proteinase. Analytical Biochemistry, 1994. 216(2): p. 413-417.
[0452] 41. Maresca, D., et al., Nonlinear X-Wave Ultrasound Imaging of Acoustic Biomolecules. Physical Review X, 2018. 8(4): p. 041001-0410012.
[0453] 42. Shapiro, M. G., et al., Biogenic gas nanostructures as ultrasonic molecular reporters. Nature Nanotechnology, 2014. 9(4): p. 311-316.
[0454] 43. Goll, D. E., et al., The calpain system. Physiological Reviews, 2003. 83(3): p. 731-801.
[0455] 44. Ono, Y. and H. Sorimachi, Calpains—an elaborate proteolytic system. Biochimica et Biophysica Acta (BBA)-Proteins and Proteomics, 2012. 1824(1): p. 224-236.
[0456] 45. Ono, Y., T. C. Saido, and H. Sorimachi, Calpain research for drug discovery: challenges and potential. Nature Reviews Drug Discovery, 2016. 15(12): p. 854-876.
[0457] 46. Suzuki, S., et al., Development of an artificial calcium-dependent transcription factor to detect sustained intracellular calcium elevation. ACS Synthetic Biology, 2014. 3(10): p. 717-722.
[0458] 47. Sauer, R. T., et al., Sculpting the proteome with AAA(+) proteases and disassembly machines. Cell, 2004. 119(1): p. 9-18.
[0459] 48. Baker, T. A. and R. T. Sauer, ClpXP, an ATP-powered unfolding and protein-degradation machine. Biochimica et Biophysica Acta (BBA)-Molecular Cell Research, 2012. 1823(1): p. 15-28.
[0460] 49. Sonnenborn, U. and J. Schulze, The non-pathogenic Escherichia coli strain Nissle 1917-features of a versatile probiotic. Microbial Ecology in Health and Disease, 2009. 21(3-4): p. 122-158.
[0461] 50. Danino, T., et al., Programmable probiotics for detection of cancer in urine. Science Translational Medicine, 2015. 7(289): p. 289ra84.
[0462] 51. Blum-Oehler, G., et al., Development of strain-specific PCR reactions for the detection of the probiotic Escherichia coli strain Nissle 1917 in fecal samples. Research in Microbiology, 2003. 154(1): p. 59-66.
[0463] 52. Elowitz, M. B. and S. Leibler, A synthetic oscillatory network of transcriptional regulators. Nature, 2000. 403(6767): p. 335-338.
[0464] 53. Gardner, T. S., C. R. Cantor, and J. J. Collins, Construction of a genetic toggle switch in Escherichia coli. Nature, 2000. 403(6767): p. 339-342.
[0465] 54. Khalil, A. S. and J. J. Collins, Synthetic biology: applications come of age. Nature Reviews Genetics, 2010. 11(5): p. 367-379.
[0466] 55. Tigges, M., et al., A tunable synthetic mammalian oscillator. Nature, 2009. 457(7227): p. 309-312.
[0467] 56. Mark Welch, J. L., et al., Spatial organization of a model 15-member human gut microbiota established in gnotobiotic mice. Proceedings of the National Academy of Sciences, 2017. 114(43): p. E9105-E9114.
[0468] 57. Geva-Zatorsky, N., et al., In vivo imaging and tracking of host-microbiota interactions via metabolic labeling of gut anaerobic bacteria. Nature Medicine, 2015. 21(9): p. 1091-100.
[0469] 58. Foucault, M. L., et al., In vivo bioluminescence imaging for the study of intestinal colonization by Escherichia coli in mice. Applied and Environmental Microbiology, 2010. 76(1): p. 264-74.
[0470] 59. Donaldson, G. P., S. M. Lee, and S. K. Mazmanian, Gut biogeography of the bacterial microbiota. Nature Reviews Microbiology, 2016. 14(1): p. 20-32.
[0471] 60. Round, J. L. and S. K. Mazmanian, The gut microbiota shapes intestinal immune responses during health and disease. Nature Reviews Immunology, 2009. 9(5): p. 313-323.
[0472] 61. Derrien, M. and J. E. T. V. Vlieg, Fate, activity, and impact of ingested bacteria within the human gut microbiota. Trends in Microbiology, 2015. 23(6): p. 354-366.
[0473] 62. Steidler, L., et al., Treatment of murine colitis by Lactococcus lactis secreting interleukin-10. Science, 2000. 289(5483): p. 1352-1355.
[0474] 63. Daniel, C., et al., Recombinant lactic acid bacteria as mucosal biotherapeutic agents. Trends in Biotechnology, 2011. 29(10): p. 499-508.
[0475] 64. Muradali, D. and D. R. Goldberg, US of gastrointestinal tract disease. Radiographics, 2015. 35(1): p. 50-68.
[0476] 65. Machtaler, S., et al., Assessment of inflammation in an acute on chronic model of inflammatory bowel disease with ultrasound molecular imaging. Theranostics, 2015. 5(11): p. 1175.

The application's sequence listing, which the Patent Office published only in electronic form, follows.

SEQUENCE LISTING (544 sequences)

SEQ ID NO: 1 - protein, 48 aa, Artificial Sequence
  synthetic polypeptide
  MISC_FEATURE (16)..(16): X can be any amino acid
SSSLAEVLDRILDKGXVIDAWARVSLVGIEILTIEARVVIASVDTYLR

SEQ ID NO: 2 - protein, 215 aa, Artificial Sequence
  synthetic polypeptide
MGHHHHHHSGISLMAKIRQEHQSIAEKVAELSLETREFLSVTTAKRQEQAEKQAQELQAFYKDLQETSQQFLSETAQARIAQAEKQAQELLAFHKELQETSQQFLSATAQARIAQAEKQAQELLAFYQEVRETSQQFLSATAQARIAQAEKQAQELLAFHKELQETSQQFLSATADARTAQAKEQKESLLKFRQDLFVSIFGSGAANDENYALAA

SEQ ID NO: 3 - protein, 6 aa, Artificial Sequence
  synthetic polypeptide
LDRILD

SEQ ID NO: 4 - protein, 16 aa, Artificial Sequence
  synthetic polypeptide
  MISC_FEATURE (7)..(7): X can be any amino acid
RILDKGXVIDAWARVS

SEQ ID NO: 5 - protein, 5 aa, Artificial Sequence
  synthetic polypeptide
DTYLR

SEQ ID NO: 6 - protein, 8 aa, Artificial Sequence
  synthetic polypeptide
QAQELLAF

SEQ ID NO: 7 - protein, 6 aa, Artificial Sequence
  synthetic polypeptide
VVNMSV

SEQ ID NO: 8 - protein, 19 aa, Artificial Sequence
  synthetic polypeptide
KSPDSSSLAEVLDRILDKG

SEQ ID NO: 9 - protein, 36 aa, Artificial Sequence
  synthetic polypeptide
VIDAWARVSLVGIEILTIEARVVIASVDTYLRYAEA

SEQ ID NO: 10 - protein, 6 aa, Artificial Sequence
  synthetic polypeptide
NRLDLE

SEQ ID NO: 11 - protein, 4 aa, Artificial Sequence
  synthetic polypeptide
LHQF

SEQ ID NO: 12 - protein, 4 aa, Artificial Sequence
  synthetic polypeptide
LSQF

SEQ ID NO: 13 - protein, 3 aa, Artificial Sequence
  synthetic polypeptide
DAF

SEQ ID NO: 14 - protein, 18 aa, Anabaena flos-aquae
MISLMAKIRQEHQSIAEK

SEQ ID NO: 15 - protein, 33 aa, Anabaena flos-aquae
VAELSLETREFLSVTTAKRQEQAEKQAQELQAF

SEQ ID NO: 16 - protein, 33 aa, Anabaena flos-aquae
YKDLQETSQQFLSETAQARIAQAEKQAQELLAF

SEQ ID NO: 17 - protein, 33 aa, Anabaena flos-aquae
HKELQETSQQFLSATAQARIAQAEKQAQELLAF

SEQ ID NO: 18 - protein, 33 aa, Anabaena flos-aquae
YQEVRETSQQFLSATAQARIAQAEKQAQELLAF

SEQ ID NO: 19 - protein, 33 aa, Artificial Sequence
  synthetic polypeptide
HKELQETSQQFLSATADARTAQAKEQKESLLKF

SEQ ID NO: 20 - protein, 10 aa, Anabaena flos-aquae
RQDLFVSIFG

SEQ ID NO: 21 - protein, 21 aa, Halobacterium Salinarum
MSVTDKRDEMSTARDKFAESQ

SEQ ID NO: 22 - protein, 39 aa, Halobacterium Salinarum
QEFESYADEFAADITAKQDDVSDLVDAITDFQAEMTNTT

SEQ ID NO: 23 - protein, 32 aa, Halobacterium Salinarum
DAFHTYGDEFAAEVDHLRADIDAQRDVIREMQ

SEQ ID NO: 24 - protein, 38 aa, Halobacterium Salinarum
DAFEAYADIFATDIADKQDIGNLLAAIEALRTEMNSTH

SEQ ID NO: 25 - protein, 38 aa, Halobacterium Salinarum
GAFEAYADDFAADVAALRDISDLVAAIDDFQEEFIAVQ

SEQ ID NO: 26 - protein, 32 aa, Halobacterium Salinarum
DAFDNYAGDFDAEIDQLHAAIADQHDSFDATA

SEQ ID NO: 27 - protein, 40 aa, Halobacterium Salinarum
DAFAEYRDEFYRIEVEALLEAINDFQQDIGDFRAEFETTE

SEQ ID NO: 28 - protein, 44 aa, Halobacterium Salinarum
DAFVAFARDFYGHEITAEEGAAEAEAEPVEADADVEAEAEVSPD

SEQ ID NO: 29 - protein, 97 aa, Halobacterium Salinarum
EAGGESAGTEEEETEPAEVETAAPEVEGSPADTADEAEDTEAEEETEEAPEDMVQCRVCGEYYQAITEPHLQTHDMTIQEYRDEYGEDVPLRPDDKT

SEQ ID NO: 30 - protein, 21 aa, Haloferax Mediterranei
MSVKDKREKMTATREEFAEVQ

SEQ ID NO: 31 - protein, 38 aa, Haloferax Mediterranei
QAFAAYADEFAADVDDKRDVSELVDGIDTLRTEMNSTN

SEQ ID NO: 32 - protein, 25 aa, Haloferax Mediterranei
DAFRAYSEEFAADVEHFHTSVADRR

SEQ ID NO: 33 - protein, 38 aa, Haloferax Mediterranei
DAFDAYADIFATDVAEMQDVSDLLAAIDDLRAEMDETH

SEQ ID NO: 34 - protein, 38 aa, Haloferax Mediterranei
EAFDAYADAFVTDVATLRDVSDLLTAISELQSEFVSVQ

SEQ ID NO: 35 - protein, 32 aa, Haloferax Mediterranei
GEFNGYASEFGADIDQFHAVVAEKRDGHKDVA

SEQ ID NO: 36 - protein, 40 aa, Haloferax Mediterranei
DAFLQYREEFHGVEVQSLLDNIAAFQREMGDYRKAFETTE

SEQ ID NO: 37 - protein, 42 aa, Haloferax Mediterranei
EAFASFARDFYGQGAAPMATPLNNAAETAVTGTETEVDIPPI

SEQ ID NO: 38 - protein, 107 aa, Haloferax Mediterranei
EDSVEPDGEDEDSKADDVEAEAEVETVEMEFGAEMDTEADEDVQSESVREDDQFLDDETPEDMVQCLVCGEYYQAITEPHLQTHDMTIKKYREEYGEDVPLRPDDKA

SEQ ID NO: 39 - protein, 18 aa, Microchaete diplosiphon
MTPLMIRIRQEHRGIAEE

SEQ ID NO: 40 - protein, 33 aa, Microchaete diplosiphon
VTQLFKDTQEFLSVTTAQRQAQAKEQAENLHQF

SEQ ID NO: 41 - protein, 33 aa, Microchaete diplosiphon
HKDLEKDTEEFLTDTAKERMAKAKQQAEDLFQF

SEQ ID NO: 42 - protein, 33 aa, Microchaete diplosiphon
HKEMAENTQEFLSETAKERMAQAQEQARQLREF

SEQ ID NO: 43 - protein, 33 aa, Microchaete diplosiphon
HQNLEQTTNEFLADTAKERMAQAQEQKQQLHQF

SEQ ID NO: 44 - protein, 12 aa, Microchaete diplosiphon
RQDLFASIFGTF

SEQ ID NO: 45 - protein, 18 aa, Nostoc sp.
MTALMVRIRQEHRSIAEE

SEQ ID NO: 46 - protein, 33 aa, Nostoc sp.
VTQLFRETHEFLSATTAHRQEQAKQQAQQLHQF

SEQ ID NO: 47 - protein, 33 aa, Nostoc sp.
HQNLEQTTHEFLTETTTQRVAQAEAQANFLHKF

SEQ ID NO: 48 - protein, 33 aa, Nostoc sp.
HQNLEQTTQEFLAETAKNRTEQAKAQSQYLQQF

SEQ ID NO: 49 - protein, 12 aa, Nostoc sp.
RKDLFASIFGTF

SEQ ID NO: 50 - protein, 125 aa, Artificial Sequence
  synthetic polypeptide
  MISC_FEATURE (4)..(4): X indicates any amino acid
  MISC_FEATURE (11)..(11): X indicates any amino acid
  MISC_FEATURE (14)..(14): X indicates any amino acid
  MISC_FEATURE (31)..(31): X indicates any amino acid
  MISC_FEATURE (32)..(32): X indicates any amino acid
  MISC_FEATURE (34)..(34): X indicates any amino acid
  MISC_FEATURE (41)..(41): X indicates any amino acid
  MISC_FEATURE (47)..(47): X indicates any amino acid
  MISC_FEATURE (59)..(59): X indicates any amino acid
  MISC_FEATURE (60)..(60): X indicates any amino acid
  MISC_FEATURE (89)..(89): X indicates any amino acid
  MISC_FEATURE (109)..(109): X indicates any amino acid
  MISC_FEATURE (123)..(123): X indicates any amino acid
RALXYLQAGYXVHXRGPAGTGKTTLAMHLAXXLXRPVMLIXGDDEFXTSDLIGSESGYXXKKVVDNYIHSVVKVEDELRQNWVDNRLTXACREGFTLVYDEFNRSRPEXNNVLLSVLEEKILXLP

SEQ ID NO: 51 - protein, 308 aa, Artificial Sequence
  synthetic polypeptide
MTVLTDKRKKGSGAFIQDDETKEVLSRALSYLKSGYSIHFTGPAGGGKTSLARALAKKRKRPVMLMHGNHELNNKDLIGDFTGYTSKKVIDQYVRSVYKKDEQVSENWQDGRLLEAVKNGYTLIYDEFTRSKPATNNIFLSILEEGVLPLYGVKMTDPFVRVHPDFRVIFTSNPAEYAGVYDTQDALLDRLITMFIDYKDIDRETAILTEKTDVEEDEARTIVTLVANVRNRSGDENSSGLSLRASLMIATLATQQDIPIDGSDEDFQTLCIDILHHPLTKCLDEENAKSKAEKIILEECKNIDTEEK

SEQ ID NO: 52 - protein, 255 aa, Artificial Sequence
  synthetic polypeptide
MSETNETGIYIFSAIQTDKDEEFGAVEVEGTKAETFLIRYKDAAMVAAEVPMKIYHPNRQNLLMHQNAVAAIMDKNDTVIPISFGNVFKSKEDVKVLLENLYPQFEKLFPAIKGKIEVGLKVIGKKEWLEKKVNENPELEKVSASVKGKSEAAGYYERIQLGGMAQKMFTSLQKEVKTDVFSPLEEAAEAAKANEPTGETMLLNASFLINREDEAKFDEKVNEAHENWKDKADFHYSGPWPAYNFVNIRLKVEEK

SEQ ID NO: 53 - protein, 8 aa, Artificial Sequence
  synthetic polypeptide
LEVLFQGP

SEQ ID NO: 54 - protein, 5 aa, Artificial Sequence
  synthetic polypeptide
DDDDK

SEQ ID NO: 55 - protein, 4 aa, Artificial Sequence
  synthetic polypeptide
IEGR

SEQ ID NO: 56 - protein, 7 aa, Artificial Sequence
  synthetic polypeptide
ENLYFQG

SEQ ID NO: 57 - protein, 6 aa, Artificial Sequence
  synthetic polypeptide
LVPRGS

SEQ ID NO: 58 - protein, 11 aa, Artificial Sequence
  synthetic polypeptide
QQEVYGMMPRD

SEQ ID NO: 59 - protein, 6 aa, Artificial Sequence
  synthetic polypeptide
PLGLAG

SEQ ID NO: 60 - protein, 7 aa, Artificial Sequence
  synthetic polypeptide
PQGIAAQ

SEQ ID NO: 61 - protein, 8 aa, Artificial Sequence
  synthetic polypeptide
GPLGVRGY

SEQ ID NO: 62 - protein, 6 aa, Artificial Sequence
  synthetic polypeptide
SGRSAG

SEQ ID NO: 63 - protein, 16 aa, Artificial Sequence
  synthetic polypeptide
LGGSGRSANAILEGSG

SEQ ID NO: 64 - protein, 7 aa, Artificial Sequence
  synthetic polypeptide
GSGSGSG

SEQ ID NO: 65 - protein, 5 aa, Artificial Sequence
  synthetic polypeptide
GGGGS

SEQ ID NO: 66 - protein, 5 aa, Artificial Sequence
  synthetic polypeptide
GSGSG

SEQ ID NO: 67 - protein, 4 aa, Artificial Sequence
  synthetic polypeptide
GGGG

SEQ ID NO: 68 - protein, 3 aa, Artificial Sequence
  synthetic polypeptide
GGG

SEQ ID NO: 69 - protein, 2 aa, Artificial Sequence
  synthetic polypeptide
GG

SEQ ID NO: 70 - protein, 2 aa, Artificial Sequence
  synthetic polypeptide
GS

SEQ ID NO: 71 - protein, 4 aa, Artificial Sequence
  synthetic polypeptide
GSGS

SEQ ID NO: 72 - protein, 4 aa, Artificial Sequence
  synthetic polypeptide
GGGS

SEQ ID NO: 73 - protein, 3 aa, Artificial Sequence
  synthetic polypeptide
GGS

SEQ ID NO: 74 - protein, 3 aa, Artificial Sequence
  synthetic polypeptide
GTS

SEQ ID NO: 75 - protein, 6 aa, Artificial Sequence
  synthetic polypeptide
GGSGGS

SEQ ID NO: 76 - protein, 3 aa, Artificial Sequence
  synthetic polypeptide
GGG

SEQ ID NO: 77 - protein, 6 aa, Artificial Sequence
  synthetic polypeptide
GGGGGG

SEQ ID NO: 78 - protein, 9 aa, Artificial Sequence
  synthetic polypeptide
GGGGGGGGG

SEQ ID NO: 79 - protein, 12 aa, Artificial Sequence
  synthetic polypeptide
GGGGGGGGGGGG

SEQ ID NO: 80 - protein, 15 aa, Artificial Sequence
  synthetic polypeptide
GGGGGGGGGGGGGGG

SEQ ID NO: 81 - protein, 3 aa, Artificial Sequence
  synthetic polypeptide
GGS

SEQ ID NO: 82 - protein, 6 aa, Artificial Sequence
  synthetic polypeptide
GGSGGS

SEQ ID NO: 83 - protein, 9 aa, Artificial Sequence
  synthetic polypeptide
GGSGGSGGS

SEQ ID NO: 84 - protein, 12 aa, Artificial Sequence
  synthetic polypeptide
GGSGGSGGSGGS

SEQ ID NO: 85 - protein, 15 aa, Artificial Sequence
  synthetic polypeptide
GGSGGSGGSGGSGGS

SEQ ID NO: 86 - protein, 3 aa, Artificial Sequence
  synthetic polypeptide
GSG

SEQ ID NO: 87 - protein, 6 aa, Artificial Sequence
  synthetic polypeptide
GSGGSG

SEQ ID NO: 88 - protein, 9 aa, Artificial Sequence
  synthetic polypeptide
GSGGSGGSG

SEQ ID NO: 89 - protein, 12 aa, Artificial Sequence
  synthetic polypeptide
GSGGSGGSGGSG

SEQ ID NO: 90 - protein, 15 aa, Artificial Sequence
  synthetic polypeptide
GSGGSGGSGGSGGSG

SEQ ID NO: 91 - protein, 5 aa, Artificial Sequence
  synthetic polypeptide
GGGGS

SEQ ID NO: 92 - protein, 10 aa, Artificial Sequence
  synthetic polypeptide
GGGGSGGGGS

SEQ ID NO: 93 - protein, 15 aa, Artificial Sequence
  synthetic polypeptide
GGGGSGGGGSGGGGS

SEQ ID NO: 94 - protein, 20 aa, Artificial Sequence
  synthetic polypeptide
GGGGSGGGGSGGGGSGGGGS

SEQ ID NO: 95 - protein, 25 aa, Artificial Sequence
  synthetic polypeptide
GGGGSGGGGSGGGGSGGGGSGGGGS

SEQ ID NO: 96 - protein, 193 aa, Anabaena flos-aquae
MISLMAKIRQEHQSIAEKVAELSLETREFLSVTTAKRQEQAEKQAQELQAFYKDLQETSQQFLSETAQARIAQAEKQAQELLAFHKELQETSQQFLSATAQARIAQAEKQAQELLAFYQEVRETSQQFLSATAQARIAQAEKQAQELLAFHKELQETSQQFLSATADARTAQAKEQKESLLKFRQDLFVSIFG

SEQ ID NO: 97 - protein, 382 aa, Halobacterium salinarum
MSVTDKRDEMSTARDKFAESQQEFESYADEFAADITAKQDDVSDLVDAITDFQAEMTNTTDAFHTYGDEFAAEVDHLRADIDAQRDVIREMQDAFEAYADIFATDIADKQDIGNLLAAIEALRTEMNSTHGAFEAYADDFAADVAALRDISDLVAAIDDFQEEFIAVQDAFDNYAGDFDAEIDQLHAAIADQHDSFDATADAFAEYRDEFYRIEVEALLEAINDFQQDIGDFRAEFETTEDAFVAFARDFYGHEITAEEGAAEAEAEPVEADADVEAEAEVSPDEAGGESAGTEEEETEPAEVETAAPEVEGSPADTADEAEDTEAEEETEEEAPEDMVQCRVCGEYYQAITEPHLQTHDMTIQEYRDEYGEDVPLRPDDKT

SEQ ID NO: 98 - protein, 381 aa, Halobacterium mediterranei
MSVKDKREKMTATREEFAEVQQAFAAYADEFAADVDDKRDVSELVDGIDTLRTEMNSTNDAFRAYSEEFAADVEHFHTSVADRRDAFDAYADIFATDVAEMQDVSDLLAAIDDLRAEMDETHEAFDAYADAFVTDVATLRDVSDLLTAISELQSEFVSVQGEFNGYASEFGADIDQFHAVVAEKRDGHKDVADAFLQYREEFHGVEVQSLLDNIAAFQREMGDYRKAFETTEEAFASFARDFYGQGAAPMATPLNNAAETAVTGTETEVDIPPIEDSVEPDGEDEDSKADDVEAEAEVETVEMEFGAEMDTEADEDVQSESVREDDQFLDDETPEDMVQCLVCGEYYQAITEPHLQTHDMTIKKYREEYGEDVPLRPDDKA

SEQ ID NO: 99 - protein, 162 aa, Microchaete diplosiphon
MTPLMIRIRQEHRGIAEEVTQLFKDTQEFLSVTTAQRQAQAKEQAENLHQFHKDLEKDTEEFLTDTAKERMAKAKQQAEDLFQFHKEMAENTQEFLSETAKERMAQAQEQARQLREFHQNLEQTTNEFLADTAKERMAQAQEQKQQLHQFRQDLFASIFGTF

SEQ ID NO: 100 - protein, 129 aa, Nostoc sp.
MTALMVRIRQEHRSIAEEVTQLFRETHEFLSATTAHRQEQAKQQAQQLHQFHQNLEQTTHEFLTETTTQRVAQAEAQANFLHKFHQNLEQTTQEFLAETAKNRTEQAKAQSQYLQQFRKDLFASIFGTF

SEQ ID NO: 101 - protein, 197 aa, Artificial Sequence
  synthetic polypeptide
MISLMAKIRQEHQSIAEKVAELSLETREFLSVTTAKRQEQAEKQAQELQAFYKDLQETSQQFLSETAGSGSGSGENLYFQGSGSGSGFHKELQETSQQFLSATAQARIAQAEKQAQELLAFYQEVRETSQQFLSATAQARIAQAEKQAQELLAFHKELQETSQQFLSATADARTAQAKEQKESLLKFRQDLFVSIFG

SEQ ID NO: 102 - protein, 199 aa, Artificial Sequence
  synthetic polypeptide
MGISLMAKIRQEHQSIAEKVAELSLETREFLSVTTAKRQEQAEKQAQELQAFYKDLQETSQGSGSGQQEVYGMMPRDGSGSGQAQELLAFHKELQETSQQFLSATAQARIAQAEKQAQELLAFYQEVRETSQQFLSATAQARIAQAEKQAQELLAFHKELQETSQQFLSATADARTAQAKEQKESLLKFRQDLFVSIFG

SEQ ID NO: 103 - protein, 18 aa, Artificial Sequence
  synthetic polypeptide
MISLMAKIRQEHQSIAEK

SEQ ID NO: 104 - protein, 33 aa, Artificial Sequence; identical to SEQ ID NO: 15
  synthetic polypeptide

SEQ ID NO: 105 - protein, 37 aa, Artificial Sequence
  synthetic polypeptide
YKDLQETSQQFLSETAGSGSGSGENLYFQGSGSGSGF

SEQ ID NO: 106 - protein, 33 aa, Artificial Sequence; identical to SEQ ID NO: 17
  synthetic polypeptide

SEQ ID NO: 107 - protein, 33 aa, Artificial Sequence; identical to SEQ ID NO: 18
  synthetic polypeptide

SEQ ID NO: 108 - protein, 33 aa, Artificial Sequence; identical to SEQ ID NO: 19
  synthetic polypeptide

SEQ ID NO: 109 - protein, 10 aa, Artificial Sequence
  synthetic polypeptide
RQDLFVSIFG

SEQ ID NO: 110 - protein, 18 aa, Artificial Sequence
  synthetic polypeptide
MISLMAKIRQEHQSIAEK

SEQ ID NO: 111 - protein, 33 aa, Artificial Sequence; identical to SEQ ID NO: 15
  synthetic polypeptide

SEQ ID NO: 112 - protein, 38 aa, Artificial Sequence
  synthetic polypeptide
YKDLQETSQGSGSGQQEVYGMMPRDGSGSGQAQELLAF

SEQ ID NO: 113 - protein, 33 aa, Artificial Sequence; identical to SEQ ID NO: 17
  synthetic polypeptide

SEQ ID NO: 114 - protein, 33 aa, Artificial Sequence; identical to SEQ ID NO: 18
  synthetic polypeptide

SEQ ID NO: 115 - protein, 33 aa, Artificial Sequence; identical to SEQ ID NO: 19
  synthetic polypeptide

SEQ ID NO: 116 - protein, 10 aa, Artificial Sequence
  synthetic polypeptide
RQDLFVSIFG

SEQ ID NO: 117 - protein, 27 aa, Artificial Sequence
  synthetic polypeptide
MGHHHHHHSGISLMAKIRQEHQSIAEK

SEQ ID NO: 118 - protein, 33 aa, Artificial Sequence; identical to SEQ ID NO: 15
  synthetic polypeptide

SEQ ID NO: 119 - protein, 33 aa, Artificial Sequence; identical to SEQ ID NO: 16
  synthetic polypeptide

SEQ ID NO: 120 - protein, 33 aa, Artificial Sequence; identical to SEQ ID NO: 17
  synthetic polypeptide

SEQ ID NO: 121 - protein, 33 aa, Artificial Sequence; identical to SEQ ID NO: 18
  synthetic polypeptide

SEQ ID NO: 122 - protein, 33 aa, Artificial Sequence; identical to SEQ ID NO: 19
  synthetic polypeptide

SEQ ID NO: 123 - protein, 23 aa, Artificial Sequence
  synthetic polypeptide
RQDLFVSIFGSGAANDENYALAA

SEQ ID NO: 124 - DNA, 4 bp, Artificial Sequence
  synthetic polynucleotide
tata

SEQ ID NO: 125 - DNA, 9 bp, Artificial Sequence
  synthetic polynucleotide
gccaccatg

SEQ ID NO: 126 - DNA, 9 bp, Artificial Sequence
  synthetic polynucleotide
ttcaccatg

SEQ ID NO: 127 - DNA, 12 bp, Artificial Sequence
  synthetic polynucleotide
cccttcaccatg

SEQ ID NO: 128 - DNA, 9 bp, Artificial Sequence
  synthetic polynucleotide
  misc_feature (1)..(1): N can be any nucleotide
  misc_feature (2)..(2): N can be any nucleotide
  misc_feature (3)..(3): N can be any nucleotide
  misc_feature (4)..(4): M is A or G
  misc_feature (5)..(5): N can be any nucleotide
  misc_feature (6)..(6): N can be any nucleotide
nnnmnnatg

SEQ ID NO: 129 - RNA, 6 nt, Artificial Sequence
  synthetic polynucleotide
aauaaa

SEQ ID NO: 130 - protein, 72 aa, Artificial Sequence
  synthetic polypeptide
  MISC_FEATURE (46)..(46): X can be any amino acid
  MISC_FEATURE (65)..(65): X can be any amino acid
  MISC_FEATURE (72)..(72): X can be any amino acid
MAVEKTNSSSSLAEVIDRILDKGIVIDAWVRVSLVGIELLAIEARXVIASVETYLKYAEAVGLTXSAAVPAX

SEQ ID NO: 131 - protein, 71 aa, Aphanizomenon-flos-aquae_gvpA
MAVEKTNSSSSLAEVIDRILDKGIVIDAWVRVSLVGIELLAIEARIVIASVETYLKYAEAVGLTQSAAVPA

SEQ ID NO: 132 - protein, 72 aa, Aphanothece-halophytica_gvpA
MAVEKTNSSSSLGEVVDRILDKGVVVDLWVRVSLVGIELLAVEARVVVASVETYLKYAEAVGLTSSAAVPAE

SEQ ID NO: 133 - protein, 71 aa, Anabaena-flos-aquae_gvpA; identical to SEQ ID NO: 131

SEQ ID NO: 134 - protein, 70 aa, Ancylobacter-aquaticus_gvpA
MAVEKINASSSLAEVVDRILDKGVVVDAWVRVSLVGIELLAVEARVVVAGVDTYLKYAEAVGLTASAQAA

SEQ ID NO: 135 - protein, 70 aa, Aquabacter-spiritensis_gvpA
MAVEKINASSSLAEVVDRILDKGVVVDAWVRVSLVGIELLAVEARVVVAGVDTYLKYAEAVGLTAGAQAA

SEQ ID NO: 136 - protein, 72 aa, Arthrospira-sp-PCC-8005_gvpA
MAVEKVNSSSSLAEVIDRILDKGIVIDAWVRVSLVGIELLSVEARVVIASVETYLKYAEAVGLTAQAAVPSV

SEQ ID NO: 137 - protein, 71 aa, Calothrix-sp-strain-PCC-7601_gvpA
MAVEKTNSSSSLAEVIDRILDKGIVVDAWVRVSLVGIELLAIEARIVIASVETYLKYAEAVGLTQSAAVPA

SEQ ID NO: 138 - protein, 72 aa, Dactylococcopsis-salina-PCC-8305_gvpA1
MAVEKTNSSSSLGEVVDRILDKGVVVDLWVRVSLVGIELLAVEARVVIASVETYLKYAEAVGLTSSAAVPAE

SEQ ID NO: 139 - protein, 71 aa, Dolichospermum-circinale-AWQC131C_gvpA; identical to SEQ ID NO: 131

SEQ ID NO: 140 - protein, 71 aa, Dolichospermum-lemmermannii_gvpA; identical to SEQ ID NO: 131

SEQ ID NO: 141 - protein, 70 aa, Enhydrobacter-aerosaccus_gvpA1
MAVEKMNASSSLAEVVDRILDKGIVIDAWVRVSLVGIELLAVEARVVVAGVDTYLKYAEAVGLTAGAEAA

SEQ ID NO: 142 - protein, 72 aa, Lyngbya-confervoides-BDU141951_gvpA
MAVEKVNSSSSLAEVVDRILDKGIVVDAWVRVSLVGIELLAIEARVVIASVETYLKYAEAVGLTAQAAVPAS

SEQ ID NO: 143 - protein, 73 aa, Nostoc-punctiforme-PCC-73102_gvpA
MAVEKVNSSSSLAEVIDRILDKGIVIDAWVRVSLVGIELLSIEARIVIASVETYLRYAEAVGLTSQAAVPSAA

SEQ ID NO: 144 - protein, 71 aa, Nostoc-sp-PCC-7120_gvpA
MAVEKTNSSSSLAEVIDRILDKGIVVDAWVRVSLVGIELLAIEARIVIASVETYLKYAEAVGLTQSAAMPA

SEQ ID NO: 145 - protein, 71 aa, Microchaete-diplosiphon_gvpA; identical to SEQ ID NO: 137

SEQ ID NO: 146 - protein, 71 aa, Microcystis-aeruginosa-NIES-843_gvpA1
MAVEKTNSSSSLAEVIDRILDKGIVIDAWARVSLVGIELLAIEARVVIASVETYLKYAEAVGLTQSAAVPA

SEQ ID NO: 147 - protein, 71 aa, Microcystis-aeruginosa-NIES-843_gvpA2; identical to SEQ ID NO: 146

SEQ ID NO: 148 - protein, 71 aa, Microcystis-aeruginosa-NIES-843_gvpA3; identical to SEQ ID NO: 146

SEQ ID NO: 149 - protein, 71 aa, Microcystis-flos-aquae-TF09_gvpA; identical to SEQ ID NO: 146

SEQ ID NO: 150 - protein, 72 aa, Phormidium-tenue-NIES-30_gvpA
MAVEKVNSSSSLAEVVDRILDKGIVIDAWVRVSLVGIELLAIEARVVIASVDTYLKYAEAVGLTAQAAVPAA

SEQ ID NO: 151 - protein, 72 aa, Planktothrix-agardhii_gvpA
MAVEKVNSSSSLAEVIDRILDKGIVIDAWVRVSLVGIELLSIEARIVIASVETYLKYAEAVGLTAQAAVPSV

SEQ ID NO: 152 - protein, 72 aa, Planktothrix-rubescens_gvpA; identical to SEQ ID NO: 151

SEQ ID NO: 153 - protein, 72 aa, Pseudanabaena-galeata-PCC-6901_gvpA
MAVEKVNSSSSLAEVIDRILDKGIVIDAWVRVSLVGIELLSIEARVVIASVETYLKYAEAVGLTASAAVPAA

SEQ ID NO: 154 - protein, 70 aa, Stella-vacuolata_gvpA
MAVEKINASSSLAEVVDRILDKGVVVDAWVRVSLVGIELLAVEARVVVAGVDTYLKYAEAVGLTAGAQTA

SEQ ID NO: 155 - protein, 75 aa, Trichodesmium-erythraeum-IMS101_gvpA3
MAVEKVNSSSSLAEVIDRILDKGVVVDAWIRLSLVGIELLTIEARIVVASVETYLKYAEAVGLTTLAAAPGEAAA

SEQ ID NO: 156 - protein, 72 aa, Trichodesmium-erythraeum-IMS101_gvpA4
MAVEKVNSSSSLAEVIDRILDKGVVVDAWVRLSLVGIELLTIEARIVIASVETYLKYAEAVGLTTLAAEPAA

SEQ ID NO: 157 - protein, 71 aa, Tolypothrix-sp.-PCC-7601_gvpA1; identical to SEQ ID NO: 137

SEQ ID NO: 158 - protein, 71 aa, Tolypothrix-sp.-PCC-7601_gvpA2; identical to SEQ ID NO: 137

SEQ ID NO: 159 - protein, 78 aa, Artificial Sequence
  synthetic polypeptide
  MISC_FEATURE (29)..(29): X can be any amino acid
  MISC_FEATURE (73)..(73): X can be any amino acid
MAQPDSSSLAEVLDRVLDKGVVVDVWARXSLVGIEILTVEARVVAASVDTFLHYAEEIAKIEQAELTAGAEAXPAPEA

SEQ ID NO: 160 - protein, 76 aa, Halobacterium-salinarum_gvpA1
MAQPDSSGLAEVLDRVLDKGVVVDVWARVSLVGIEILTVEARVVAASVDTFLHYAEEIAKIEQAELTAGAEAAPEA

SEQ ID NO: 161 - protein, 79 aa, Halobacterium-salinarum_gvpA2
MAQPDSSSLAEVLDRVLDKGVVVDVWARISLVGIEILTVEARVVAASVDTFLHYAEEIAKIEQAELTAGAEAPEPAPEA

SEQ ID NO: 162 - protein, 76 aa, Halobacterium-salinarum-NRC-1_gvpA1; identical to SEQ ID NO: 160

SEQ ID NO: 163 - protein, 79 aa, Halobacterium-salinarum-NRC-1_gvpA2; identical to SEQ ID NO: 161

SEQ ID NO: 164 - protein, 78 aa, Haloferax-mediterranei-ATCC-33500_gvpA
MVQPDSSSLAEVLDRVLDKGVVVDVWARISLVGIEILTVEARVVAASVDTFLHYAEEIAKIEQAELTAGAEAAPTPEA

SEQ ID NO: 165 - protein, 78 aa, Halogeometricum-borinquense-DSM-11551_gvpA
MAQPDSSSLAEVLDRVLDKGVVVDVWARVSLVGIEILTVEARVVAASVDTFLHYAEEIAKIEQAELTATAEAAPTPEA

SEQ ID NO: 166 - protein, 76 aa, Halopenitus-persicus-strain-DC30_gvpA; identical to SEQ ID NO: 160

SEQ ID NO: 167 - protein, 72 aa, Haloquadratum-walsbyi-C23_gvpA
MAQPDSSSLAEVLDRVLDKGIVVDTFARISLVGIEILTVEARVVVASVDTFLHYAEEIAKIEQAELTAGAEA

SEQ ID NO: 168 - protein, 78 aa, Halorubrum-vacuolatum-strain-DSM-8800_gvpA
MAQPDSSSLAEVLDRVLDKGVVVDVYARLSLVGIEILTVEARVVAASVDTFLHYAEEIAKIEQAELTAGAEAAPTPEA

SEQ ID NO: 169 - protein, 95 aa, Halopiger-xanaduensis_gvpA1
MAQPQRRPDSSSLAEVLDRILDKGVVIDVWARISVVGIELLTIEARVVVASVDTFLHYAEEIAKIEQATAEGDLEELEELEVEPRPESSPQSAAE

SEQ ID NO: 170 - protein, 95 aa, Natrialba-magadii-ATCC-43099_gvpA
MAQPQRRPDSSSLAEVLDRVLDKGVVIDIWARVSVVGIELLTVEARVVVASVDTFLHYAEEIAKIEQATAEGDLEDLEELEVEPRPESSPKSATE

SEQ ID NO: 171 - protein, 94 aa, Natrinema-pellirubrum-DSM-15624_gvpA1
MAQPQRRPDSSSLAEVLDRVLDKGVVIDVWARISVVGIELLTIEARVVVASVDTFLHYAEEIAKIEQATAEGDLDELEELEVEPRPESSPKSAE

SEQ ID NO: 172 - protein, 95 aa, Natronobacterium-gregoryi-SP2_gvpA1
MAQPQRRPDSSSLAEVLDRILDKGVVIDVWARVSVVGIELLTIEARVVVASVDTFLHYAEEIAKIEQATAEGDLEDLEELEVEPRPESSPQSATE

SEQ ID NO: 173 - protein, 74 aa, Methanosaeta-thermophila_gvpA1
MVTSTPDSSSLAEVLDRILDKGIVVDVWARVSLVGIEILTVEARVVVASVDTFLHYSEEMAKIEQAAIAAAPSA

SEQ ID NO: 174 - protein, 76 aa, Methanosaeta-thermophila_gvpA2
MVTSTPDSSSLAEVLDRILDKGIVVDVWARVSLVGIEILTVEARVVVASVDTFLHYSEEMAKIEQAAIAAAPGVPA

SEQ ID NO: 175 - protein, 76 aa, Methanosarcina-barkeri-3_gvpA1
MVSQSPDSSSLAEVLDRILDKGIVVDVWARVSLVGIEILAIEARVVVASVDTFLHYAEEITKIEIAAKEEKPAIAA

SEQ ID NO: 176 - protein, 76 aa, Methanosarcina-vacuolata_gvpA1
MVSQSPDSSSLAEVLDRILDKGIVVDTWARVSLVGIEILAIEARVVVASVDTFLHYAEEITKIEIAAREEKPVIAA

SEQ ID NO: 177 - protein, 76 aa, Methanosarcina-vacuolata_gvpA2
MVSQSPDCSSLAEVLDRILDKGIVVDTWARVSLVGIEILAIEARVVVASVDTFLHYAEEITKIEIAAREEKPVIAA

SEQ ID NO: 178 - protein, 87 aa, Haladaptatus-paucihalophilus-DX253_gvpA
MVQAEPNSSSLADVLDRILDKGVVIDVWARISVVGIEVLTVEARVVVASVDTFLHYAKEMAKLERASSEDEIDFEQVEVASPEASTS

SEQ ID NO: 179 - protein, 73 aa, Artificial Sequence
  synthetic polypeptide
  MISC_FEATURE (8)..(8): X can be any amino acid
  MISC_FEATURE (34)..(34): X can be any amino acid
  MISC_FEATURE (73)..(73): X can be any amino acid
MSIQKSTXSSSLAEVIDRILDKGIVIDAFARVSXVGIEILTIEARVVIASVDTWLRYAEAVGLLDVEEGLPRX

SEQ ID NO: 180 - protein, 86 aa, Bacillus-megaterium_gvpA
MSIQKSTDSSSLAEVIDRILDKGIVIDAFARVSLVGIEILTIEARVVIASVDTWLRYAEAVGLLTDKVEEEGLPGRTEERGAGLSF

SEQ ID NO: 181 - protein, 88 aa, Bacillus-megaterium_gvpB
MSIQKSTNSSSLAEVIDRILDKGIVIDAFARVSVVGIEILTIEARVVIASVDTWLRYAEAVGLLRDDVEENGLPERSNSSEGQPRFSI

SEQ ID NO: 182 - protein, 72 aa, Artificial Sequence
  synthetic polypeptide
  MISC_FEATURE (31)..(31): X can be any amino acid
  MISC_FEATURE (67)..(67): X can be any amino acid
MAKVQKSTDSSSLAEVVDRILDKGIVIDAWXKVSLVGIELLSIEARVVIASVETYLKYAEAIGLTAXAAAPA

SEQ ID NO: 183 - protein, 73 aa, Burkholderia-sp-Bp5365_gvpA1
MAKVQKSTDSSSLAEVVDRILDKGIVIDVWAKVSLVGIELLSIEARVVIASVETYLKYAEAIGLTATAAAPTA

SEQ ID NO: 184 - protein, 72 aa, Desulfobacterium-vacuolatum-DSM-3385_gvpA
MAKVQKTTDSSSLAEVVDRILDKGIVVDAWAKISLVGIELISIEARVVIASVETYLKYAEAIGLTAAAAAPA

SEQ ID NO: 185 - protein, 72 aa, Desulfomonile-tiedjei-DSM-6799_gvpA1
MAKIAKSTDSSSLAEVVDRILDKGIVIDAWAKVSLVGIELLSVEARVVIASVETYLKYAEAIGLTASAAAPA

SEQ ID NO: 186 - protein, 72 aa, Isosphaera-pallida-ATCC-43644_gvpA1
MAKVTKSTDSSSLAEVVDRILDKGIVIDAFAKVSLVGIELLSVEARVVIASVETYLKYAEAIGLTASAATPA

SEQ ID NO: 187 - protein, 72 aa, Lamprocystis-purpurea-DSM-4197_gvpA1
MAKVANSTDSSSLAEVVDRILDKGIVIDAWIKVSLVGIELLAIEARIVIASVETYLKYAEAIGLTAPAAAPA

SEQ ID NO: 188 - protein, 72 aa, Lamprocystis-purpurea-DSM-4197_gvpA2
MAKVANSTDSSSLAEVVDRILDKGIVIDAWLKVSLVGIELLAVEARVVIASVETYLKYAEAIGLTAPAAAPA

SEQ ID NO: 189 - protein, 72 aa, Legionella-drancourtii-LLAP12_gvpA1
MAKVQKSTDSSSLAEVIDRILDKGIVIDVWAKVSLVGIELLSIEARVVIASVETYLKYAEAIGLTATASHPA

SEQ ID NO: 190 - protein, 72 aa, Psychromonas-Ingrahamii_gvpA1
MANVQKTTDSSGLAEVIDRILDKGIVIDAFVKVSLVGIELLSIEARVVIASVETYLKYAEAIGLTASAATPA

SEQ ID NO: 191 - protein, 72 aa, Psychromonas-Ingrahamii_gvpA4
MANVQKSTDSSGLAEVVDRILEKGIVIDAFVKVSLVGIELLSIEARVVIASVETYLKYAEAIGLTASAATPA

SEQ ID NO: 192 - protein, 72 aa, Serratia-39006_gvpA1
MAKVQKSTDSSSLAEVVDRILDKGIVIDAWVKVSLVGIELLSIEARVVIASVETYLKYAEAIGLTASAATPA

SEQ ID NO: 193 - protein, 72 aa, Thiocapsa-rosea-strain-DSM-235-Ga0242571-11_gvpA1
MAKVANSTDSSSLAEVVDRILDKGIVIDAWVKVSLVGIELLAIEARVVIASVETYLKYAEAIGLTAPAAAPA

SEQ ID NO: 194 - protein, 70 aa, Bradyrhizobium-oligotrophicum-S58_gvpA1
MAIEKATASSSLAEVIDRILDKGVVIDAFVRVSLVGIELLSIELRAVVASVETWLKYAEAIGLVAQPMPA

SEQ ID NO: 195 - protein, 71 aa, Desulfotomaculum-acetoxidans-DSM-771_gvpA1
MAVKHSVASSSLVEVIDRILEKGIVIDAWARVSLVGIELLAIEARVVVASVDTFLKYAEAIGLTKFAAVPA

SEQ ID NO: 196 - protein, 67 aa, Octadecabacter-antarcticus-307_gvpA1
MAVNKMNSSSSLAEVVDRILDKGVVIDAWVRVSLVGIELIAVEARVVIAGVDTYLKYAEAVGLTAEA

SEQ ID NO: 197 - protein, 67 aa, Octadecabacter-arcticus-238_gvpA1
MAVSKMNSSSSLAEVVDRILDKGVVIDAWVRVSLVGIELIAVEARVVIAGVDTYLKYAEAVGLTAEA

SEQ ID NO: 198 - protein, 68 aa, Pelodictyon-luteolum-DSM-273_gvpA1
MAVEKTIGSSSLVEVIDRILDKGVVVDAWVRMSLVGIELLAIEARVVVASVETYLKYAEAIGLTAKAA

SEQ ID NO: 199 - protein, 68 aa, Pelodictyon-luteolum-DSM-273_gvpA2
MAVEKTIGSSSLVEVIDRILDKGVVVDAWVRVSLVGIELLAIEARVVVASVETYLKYAEAIGLTAKAA

SEQ ID NO: 200 - protein, 68 aa, Pelodictyon-phaeoclathratiforme_gvpA1
MSVEKTIGSSSLVEVIDRILDKGVVVDAWVRVSLVGIELLAIEARVVVASVETYLKYAEAIGLTAKAA

SEQ ID NO: 201 - protein, 70 aa, Rhodobacter-capsulatus-SB-1003_gvpA1
MAIEKSLASASIAEVIDRVLDKGIVVDAFVRISLVGIELLAIELRAVVASVETWLKYAEAIGLTVDPQTP

SEQ ID NO: 202 - protein, 70 aa, Rhodobacter-sphaeroides_gvpA1
MAIEKSVASASIAEVIDRILDKGVVIDAFVRVSLVGIELIAIEVRAVVASIETWLKYAEAVGLTVDPATT

SEQ ID NO: 203 - protein, 245 aa, Anabaena-flos-aquae_gvpF
MSIPLYLYGIFPNTIPETLELEGLDKQPVHSQVVDEFCFLYSEARQEKYLASRRNLLTHEKVLEQTMHAGFRVLLPLRFGLVVKDWETIMSQLINPHKDQLNQLFQKLAGKREVSIKIFWDAKAELQTMMESHQDLKQQRDNMEGKKLSMEEVIQIGQLIEINLLARKQAVIEVFSQELNPFAQEIVVSDPMTEEMIYNAAFLIPWESESEFSERVEVIDQKFGDRLRIRYNNFTAPYTFAQLDS

SEQ ID NO: 204 - protein, 268 aa, Ancylobacter aquaticus strain UV5_gvpF
MSATLSAPGTANVAVEATAAADGKYLYGIIEAPAPATFDVPAIGGRGDVVHTIALGRLAAVVSNSPRIDYDNSRRNMLAHTKVLEAVMARHTLLPVCFGTVGSDAEVIIEKILRERRDELAGLLGQMHGRMELGLKASWREEIIFEEVLAENPAIRKLRDALVGRSPDQSHYERIQLGERIGQALQRKRQDDEERILERVRPFVHKTRLNKLIGDRMVINAAFLVDAAVESRLDASIRAMDEEWGGRLAFKYVGPVPPYNFVTITIHW

SEQ ID NO: 205 - protein, 245 aa, Aphanizomenon flos-aquae NIES-81_gvpF
MNTGLYLYGIFPDPIPETVDLQGLDKQSVHSQVVDGFSFLYSDACQEKYLASRRNLLTHEKVLEQAMHEGFHVLLPLRFGLVVKDWETIQKQLIEPYKEQLNELFQKLAGQREVSIKILWDSKSELQAMMESNQDLKQQRDNMEGKKLKMEEIIQIGQLIESNLAARKQTVIQEFFNNLHPLAKEIIESEPMTEEMIYNAAFLIPWETESVFSERVEAIDRKFGDRLRIRYNNFTAPYTFAQLAS

SEQ ID NO: 206 - protein, 245 aa, Aphanothece halophytica (strain PCC 7418)_gvpF
MAEGFYLYGIFPPPGPQTIAVQGLDKQPIFSHTVEGFTFLYSEAQQSRYLASRRNLITHTKVLEEAMEQGFRTLLPLQFGLVVPDWESVSQDLLQHQSETLQLLFQRLEGKREVSLKIYWETDAELNALLEENPDLKARRDNLEGKNLSMDEVIQIGQALEQAMERRKQEVITRFEDALIPFAVETQENDVLTETMIYNTAFLIPWESEPEFGEAVETVDAEFAPRLKIRYNNFTPPYNFVELRE

SEQ ID NO: 207 - protein, 261 aa, Aquabacter spiritensis strain DSM 9035_gvpF
MMQTDTLAPAETVAEGKYLYCLIDAPAPDTFASPGIGGRGDVVHTITVGRLAAVVSDSPRIEYENSRRNMMAHTKVLEEVMARHTMLPVCFGTVATGPDPISGKILEGRRDELVGLLEQMRGRLELGLKATWREDVIFAEILQENPAIAKLRDSLVGRSPEKSHFERIRLGEMIGQAMERKRRDDEERILERVRPFVHKTKLNKPIGDRMILNAAVLVEAAREAGLDQAVRQMDAEWGARLSFKYVGPVPPYNFVTITIHW

SEQ ID NO: 208 - protein, 255 aa, Bacillus-megaterium_gvpF; identical to SEQ ID NO: 52

SEQ ID NO: 209 - protein, 258 aa, Bradyrhizobium oligotrophicum S58_gvpF
MSNQPIYVYGLIRAEDHQPLAVRAVGDSEQPVNIIGSGNVAALVSTIDLPEIMPTRRHMLAHTKVLEAAMANGPVLPMRFGIIVPNPATLLRVIGFRHQELRARLDEIDGRIEVALKASWDEQFMWRQLASEHPDLAVSGRTMMGRGEQQSYYDRIELGRAIGAALEERRTAARLQLLQTVTPFAVQVKELTPVDDAMFAHLALLVEKGAEPSLYQTVEALERSNDSGLKFRYVAPIPPYNFVAVTLDWEQHEQAPRR

SEQ ID NO: 210 - protein, 249 aa, Burkholderia thailandensis sp. Bp5365 strain MSMB43_gvpF
MNSRNGARYLYAVQHARDVPASLPAGIGGAAVRALTDGDVAAIVSDTGLAKVRPERRHLLAHHTVIQSLAAAGTVLPVAFGTIATSEVALRRMLRKHRNALAGELARLVDHVEMSVRLNWDVTDLFRHLIDVRPDLKAARDAMLALGSAVTRDDKIELGSRFERVLNEERARHAALVDEALDACCKEIRRDPPRHETEILHLTCLVRHAELGRFESGVAAASRELDDSLVLKYSGPCPPHHFVNLNMSL

SEQ ID NO: 211 - protein, 260 aa, Chlorobium luteolum DSM 273_gvpF1
MERDGKYIYCIIGADCECDFGPIGIGGRGDLVSTIGFEGISMVVSDHPLNRFVVDPDGILAHQRVIEAVMKEHESVIPVRFGTVAATPDEIRNLLDRRYGELSELLLRLRNKVEFNVTGRWHDMAAIYKEVERTHPEIKEQRARIESMRDGDGEALKQSLILDTGHQIEAALEVMKEEKFDAVASLFRKTAMASKMNRTTSPDMFMNAAFLIDRGREVEFDGIMEILGQKDADRCDYRYSGPLAIFNFVDLRILPEKWEL

SEQ ID NO: 212 - protein, 259 aa, Chlorobium luteolum DSM 273_gvpF2
MAHEAAEQDGLYIYGIINNSGELDFGPIGIGGREERVYAVIHNDIAAVVSRTVVKEFEPRRANMIAHQKVLEAVMVSHAVLPVRFSTVSPGHDDMKVEKILEEDYLRLKKLLVKMEGKKEMGLKVMANEEKVYESIITGYDNIRYLRDKLINLPPEKTHYQRVKIGELVAAALEKEVGTYKDAVLDALSPIAEEVKVNDSYGSMMVLNAAFLIRTAREEEFDRAVNALDDRYHDMMTFKYVGTLPPYNFVNISINIKGR

SEQ ID NO: 213 - protein, 343 aa, Chlorobium luteolum DSM 273_gvpF3
MNQSIYIYGIVNEPALAASFVETDPDIYAVASMGCSAIVENRPAIDLGELDRESLARMLLQHQQTLERLMESGMQLIPLKLGTFVSSAADAACIIEDGYNLIERIFRETEDAHELEVVVKWSSFADLLQEVVSEGDVQELKREVEARQSSSTEDAIAVGRLIKEKIDRRNAALSASVLRQLGERASQSKRHETMDDEMVLNAAFLVNRGDVDAFVATVEALDSQYLNALHFRIVGPLPCYSFYTLEVTALFEEFIAEKRAVLGLDARSCEADVKKAYHAKAKVAHPDVHVPAGANNGADFTVLNEAYMTLHDYYSALRNSASSRHGHEGQDSSSVVFSVKILN

SEQ ID NO: 214 - protein, 245 aa, Dactylococcopsis salina PCC 8305_gvpF
MTEGFYLYGIFPPPGPKTIETQGLDKQPIFSHTVEGFTFLYSEAQQSRYLASRRNLITHTKVLEEAMENGSRTLLPLQFGLIVPDWETVVQDLLQHQAESLHFFLEKLEGKREVSLKIYWETNAELNALLEENPALKARRDNLEGKQLSMDEVIQIGQALEQEMEGRKQDIISRFEEVLIPFAFEIKENDVLTETMIYNTAFLINWDAESDFGEQLEAIDAEFSPRLKIRYNNFTPPYNFVELRE

SEQ ID NO: 215 - protein, 252 aa, Desulfobacterium vacuolatum_DSM 3385_gvpF
MSKKNLKRNGRYLYAIIEASEEKTFGSIGMDGSDVYLIVEDKTAAVVSDVPNKKIRPQRKNIAAHHAVLNKIMEEITPLPMAFGIIADGEQAIRKILADNRDVFREQFATVSGKVEMGMRISYDVPNIFEYFISTDSEIRAARDQYFGGNREPSQEAKLELGRMFNRQLNANREEYTNQVIEILDDYCDDIKENKCRNEQEVTSLACLINRSDQKRFEEGVFESARHFDNNFSFEYNGPWSPHNFVNILIEL

SEQ ID NO: 216 - protein, 255 aa, Desulfomonile tiedjei DSM 6799_gvpF
MEKATIKTTGSNGRYLYAVVPGSQERVYGCLGINGGNVYTIAAKDVAAVVSDVPHQKIRPERRHFAAHQAVLKRVMLDGDLLPMSFGIISQGPKAVRAILSRNNKSVQQQLKRISGKAEMGIKVTWDVPNIFEYFIDVNRELREARNKLVQPNYLPTQQEKIEIGRMFEEILNLERERHTKQVERVMSKRCSEIKRSKCRTEIEVMNLSCLVDRTLLSDFEAGVLEAASHFDDSFAFDFNGPWAPHNFVDLEIDV

SEQ ID NO: 217 - protein, 250 aa, Desulfotomaculum acetoxidans_DSM 771_gvpF1
MSTGRYVYCVINSIEPLTFMSGPVGNEPEGVFTVHYKELAAVVSQSSEEKYNVCRENTIAHQKVLEEVLVSHPLLPVRFGTVAQNEEIVKKFLLQERYAELRSMLHNVTGKVQMGLKVLWTDMKTVYQEIVEENPQIKNLKKKLESKPAETIHYEMIDLGQMVNQALLRKKEKQKEMVLKPLQKIALETKESFLYGDQMFVNADFLISRSSLDDFNAKVNELGEFFNEQALFKYIGPLPPYNFVTLYVNF

SEQ ID NO: 218 - protein, 357 aa, Desulfotomaculum acetoxidans_DSM 771_gvpF2
MVKNHNTDHLKELYIYGLIGGTPFKDELEKISVIQENTPIYGVWHKNIGFAVSAAPDYPLKDLSKESIIQLFVDHQQVLECLRQKFSLIPVKLGTVLESVTEAAAVLANNEEKFNDLLNYLKDKVELNLSVSWNDLNEVVAKIGEEDEVKKLKQSLLAQEQVSQEDLIKIGKIISFQMQQKKQAAREYIISELRNLWEDYFINEVVDENSILNLTLLAITGKVDDVNKKIEYLNQIYRDSLDFSLTKSLLPQGFSTVSIKKITMDQLLLAKDILKLPDTASLQDINAARRALLHCYHPDKNDHAAVNKVQEINAAYKLLEEYCQENSSDFNVDLITDYYIMKVIKADKSNVNSMNME

SEQ ID NO: 219 - protein, 252 aa, Dolichospermum circinale_gvpF
MNTDLAHKNFGLYLYGIFPDTIPETLEIKGLDGKSVHSQVVDGFTFLYSQACQEKYLASRRNLLAHERVLEQTMHEGFHVLLPLRFGLVVKDWETIMSQLINPHKEQLHKLFEKLAGQREVSIKILWDAKAELQAMMESNHDLRQQRDNMEGKKLSMEEVIQIGQLIESNLQARKQAVIEVFTRELNPLAQEIVVSEPMTEEMIYNAAFLIPWDSEPLFSERVESIDQKFGNRLRIRYNNFTAPYTFALLDS

SEQ ID NO: 220 - protein, 277 aa, Enhydrobacter aerosaccus strain ATCC 27094_gvpF
MNPPEAYIAGRTAAKSVEDRKARPQDLAEGKYVYAIIACDEPREFKNRGIGERGDKVHTINHRQMAAVVSDSPTIDYERSRRNMMAHTVVLEEVMKEFDLLPLRFGTVASSAESVERQLLVPRYGELSAMLEKMRGRSEFGLKAFWHEGVAFGEIVRENARVRKLRDALQGRSLEESYYQRIQLGEEVEKALTAIRARDEELILSRLRPFMRDIRTNKIISDRMVLNAAFLVERGDVPALDEAIRQLDQEFSERLMFKYVGPVPPYNFVNIAINWER

SEQ ID NO: 221 - protein, 279 aa, Isosphaera pallida_ATCC-43644_gvpF
MRNAPPTRPGSVTPASPGKPVIDGPARYLYAFTHDLPEGPLADLEGLPGARVVVVADGRVAAVVSPCPLGKVRPERQRVAGHHHVLKHLQDTLGKAILPASFGMVADSEEDLRALLRHHSAAIAEGLVRVQGKVEMTVKLRWAPDNVAQAVLGRDPELRQLRDQLYSNGQTPTRDQSLDLGRRFHHALERQRDHYAAYLRAALSPLLSELVEEDLRDERDLVHWACLIENQRRAGFEAALDRLAEELEDDLVLELTGPWPPHHFVDLDLDDDHDDDEEE

SEQ ID NO: 222 - protein, 258 aa, Legionella drancourtii LLAP12_gvpF
MDSTSKKPAASNLYLYAIASVNENQEPISFHGIEEQPIDLVPYKDIMLVVSNLSKKKVRPERKNVAVHHAVLNHLMKHNTSMLPIRFGMIADNRKEVQRLLTINYDMLHTKLKMMAGRVEMGVSLSWDVPNIFEYLLNRHSQLRETRDKLLANPAHEPSRDEKIEIGALFSQILDEEREVYTDTILSLLSPVCCDVVKSTYRNDTEIMNIFCLISAARRDEFEEKIIEASTILDDNFVIKYTGPWPPHNFSKLNLSLE

SEQ ID NO: 223 - protein, 247 aa, Lyngbya confervoides BDU141951_gvpF
MPQLLYLYGIFPAPGPQDLEVQGLDQQPIHTHIIDEFVFLYSVAQQERYLASRKNLLGHERVLEAAMKVGYRTLLPLQFGLIIETWDRVIKELITPRGDALKRLFAKLEGRREVSVKLLWGPDAELNQLMEEDAGLRAERDRLEGQQLSMDQIVDIGQAIETAMTERKDDVINAFRQRLNALAIEVLENDPLTDAMIYNTAYLIPWEDEVKFSQAIEELDEQFEDRLRIRYNNFTAPYNFAQLDQLS

SEQ ID NO: 224 - protein, 244 aa, Microcystis aeruginosa NIES-843_gvpF
MTVGLYLYGIFPEPVPDGLVLQGIDNEPVHSEMIEGFSFLYSAAHKEKYLASRRYLICHEKVLETVMEAGFTTLLPLRFGLVIKTWESVTEQLISPYKTQLKELFAKLSGQREVSIKIFWDNQWELQAALESNPKLKQERDAMMGKNLNMEEIIHIGQLIEATVLQRKQDIIQVFRDQLNHRAQEVIESDPMTDDMIYNAAYLIPWEQEPEFSQNVEAIDQQFGDRLRIRYNNLTAPYTFAQLV

SEQ ID NO: 225 - protein, 247 aa, Nostoc punctiforme ATCC 29133_gvpF
MSFYIYGILTLPAPQNLNLEGLDRQPVQIKILDDFAVIYSEAQQERYLASRRNLLSHEKVLEEIMQAGDRYLLPVQFGLLVSSWETVSQQLIRPHQEELTQLLAKLSGCREVSVKVFWDTEAEIQGLLAEHPNLKTERDKLVGQPLSMERVIQIGQVIEQGMSDRKQGIIDVFKGTLNSIAIEVVENTPQVDTMIYNSAYLIPWEAESQFSEHVESLDRQFENRLRIRYNNFTAPYNFARLRLTTSN

SEQ ID NO: 226 - protein, 244 aa, Nostoc sp. PCC 7120_gvpF
MSSGLYLYGIFPDPIPETVTLQGLDSQLVYSQIIDGFTFLYSEAKQEKYLASRRNLISHEKVLEQAMHAGFRTLLPLRFGLVVKNWETVVTQLLQPYKAQLRELFQKLAGRREVSVKIFWDSKAELQAMMDSHQDLKQKRDQMEGKALSMEEVIHIGQLIESNLLSRKESIIQVFFDELKPLADEVIESDPMTEDMIYNAAFLIPWENESIFSQQVESIDHKFDERLRIRYNNFTAPYTFAQIS

SEQ ID NO: 227 - protein, 264 aa, Octadecabacter antarcticus 307_gvpF1
MKREVVRMTDENTINSKYLYAIIKCREQREFIARGIGERGDAVHTIAYKGLAAVVSDSPVMEYDQSRRNMMAHTAVLEELMEEFTLLPVRFNTVAPEAGAIEERLLVPRHEEFTQLLGQIDKRVELGIKAFWHDGMIFEEVLRENDSIRKMRDALEGKSVDGSYYERIQLGEKIEQAMIKKRVEDEEIILSRIRQHVHKSRSNKTIGDRMVLNGAFLVDANKESDFDKAVQLLDQDLGNRLMFKYVGPVPPYNFVNIVVNWGVV

SEQ ID NO: 228 - protein, 356 aa, Octadecabacter antarcticus 307_gvpF2
MTVVAEENMTGSVGLYVCAIVAEWESNSALIKCANEAQGEIQLIGQGGITAVVMVPPEDQPVSRDRQELVRQLLVHQQLVERFTEIAPVLPVKFGTLAPDRESVELGLERGREKFFTAFGGLSGKTQFEITVTWDVADVFAKIAKLPAVVKLKVDLVATSESDRPINLDRVGRLVKETLDHQRAQTGKVLLDALLPLGVDSIVNPILNDSIVLNLALLVDTDQADALDRCLDELDSTFHGALSFRCVGPMPPHSFATVEINYIEPTQVSHACCVLELDAAHNFEEIRSAYHRLARQTQQDIAPDVVVDNKSSSVGIAVLNDAYKTLLSFVDAGGPVVVSVQRQEDAYATDIPSSGG

SEQ ID NO: 229 - protein, 257 aa, Octadecabacter arcticus 238_gvpF1
MTDEKKVNSKYLYAIIQCREPRELKARGIGERGDVVHTVVHKGLAAVVSDSPVMEYDQSRRNMMAHTAVLEELMEEFTLLPVRFNTVAPEAVAIEERLLVPRHDEFTQLLGQIDKRVELGLKAFWHDGMIFGEVLRENDSIRKMRDSLKGQSVDGSYYERIQLGEKIEKALTEKRLEDEEMILSRIRPHVHKSRSNKTIGDRMVLNGAFLVDAEKESKFDEAVQSLDQDLSDRLMFKYVGPVPPYNFVNIVVNWGES

SEQ ID NO: 230 - protein, 360 aa, Octadecabacter arcticus 238_gvpF2
MRAQKVIPAAEENISGNVGLYVCAIVAERVSCSALIQCANDAPGEIQLIGHGDFTAVVMVPEKDQLVSPDRKELMQQLLVHQQLIEKFMEIAPVLPVKFATLAPNRESVELGLEVGSEKFSAAFNSLSGKVQFEVIVTWDVAEVFAEIAKEPAVAKLKVDLAAMPESYGSVSLEQLGKLVKETLELRRAETGKVLLDALVQVGVDNVVNSILDDSIILNLALLVEAKRADAFDRCLDELDSTYHGALTFRCVGPLPPHSFATVEITYLEPAKVTEACDILELDVARSTEEVRSAYHRLARKSHPDIVPDVAVGETASVSMAVLTDAYKTLLSFVGAGGSVVVSVQRQEASYAADIISSAG

SEQ ID NO: 231 - protein, 258 aa, Pelodictyon phaeoclathratiforme_gvpF1
MDIETTKEGRYIYGIIRNSEFIDFGQIGIGKRNDRVYGVIYKDICAVVSSTPIIQYEARRANMIAHQKVLEEVMKRFNVLPVRFSTISPHDNDDAIIKILITDYSRFDELLIKMKGKKELGLKVMADETRIYENIIQKYDNIRSLRDKLLNQPADKIHYQRVKIGEMVADALKKEIESYKQQILDILSPIAEDIKITDNYGNLMILNAAFLIKEVKESEFDDSVNKLDEKYGNIMTFKYVGTLPPYNFVNLSINTKGV

SEQ ID NO: 232 - protein, 257 aa, Pelodictyon phaeoclathratiforme_gvpF2
MEKDGKYVYCIIASTYECNFGAIGIGGRGDLVNTIGFQGLSMVVSDHPLNHFVLNPDNILAHQRVIEVVMSQFNSVIPVRFGTVAATPDEIRNLLDRRYGELSELLERFENKVEYNLKASWRCMIDIYKEIDKEHVELKQLRREIEGLKDEEKRKLLIVEAGHIIENELQKKKEVEAYEIVTYLRKTVVAHKHNKTTGEAMFMNTAFLLNKGREVEFDNIMNDLGEQYKDRSDYYYTGPLPIFNFIDLRILPEKWEL

SEQ ID NO: 233 - protein, 339 aa, Pelodictyon phaeoclathratiforme_gvpF3
MDRQGIYIYGFIPNHYLTDIKTILIESGIYSIEYGSIAALVSDTMVDDIEYLNREDLAYLLVDHQKKIELIMSTGCSTIIPMQLGTIVNSGNDVIKIVKNGLRIINKTFDDIADIQEFDLVVMWNNFPDLIKKISDTPQIRIMKEEIANKGSYDQADSINIGKIIKKKIDEKNSKVNLDIMNSLSSLCICVKKHESMNDEMPLNSAFLIKKDKENSFIEMVNQLDIKYENLLRYKIVGPLPCYSFYTLESKLLNKKEIEKAEKILGIDAYKSESDIKKAYRAKAAHAHPDKNNTISAIDNDDFIEINKAYQILLEYSSVFKDSPDHKPDEPFYLVKIKK

SEQ ID NO: 234 - protein, 244 aa, Phormidium tenue NIES-30_gvpF
MADRYYLYGIFPAPGPAELPLMGLDEQVVQAQQLGDFTFLYSLACQKRYLSSRKNLLGHEKVLEAAMEQGHRTLLPLQFGLIVESWNQVQEDLVTPYAEDLTQLFGRLNGCREVSIKVQWEPSTELEMMMAENADLRAQRDQLEGTQLGMEQVIFIGQQIESALEERKQGIVDQFRQALSPLAKDVLENAPQTDVMIYNAAFLIPWESEAEFSQAVDAIDSTFGDRLRIRYNNFTAPYNFAQLN

SEQ ID NO: 235 - protein, 245 aa, Planktothrix agardhii str. 7805_gvpF
MGNGLYLYGILPTNRVRPLALHGLDKQPIQTHPVDEFSFLYSETQQERYLASRRNLLGHEDVLEKVMQHGYRSVLPLQFGLIVKDWDHVKAQLIIPYQDRLKELFHKLEGKREVGVKIFWEETEELDLLMTENQELREKRDSLEGKRLSMDEIIGIGQEIERAMQDRQQGIIDKFQQILNPLAQEIVENDNLTSAMIYNAAYLIPWDIEPQFGDKIEELDHHFNNRLRIRYNNFTAPFNFAQLNP

SEQ ID NO: 236 - protein, 268 aa, Psychromonas ingrahamii 37_gvpF
MAENKKKVRKSSSKVIAKPKVIYAITAGGLQDLGNLVGINKSDIYTIEKESISFVVSDLSPSSPRPRPDRRNIMAHNEILKQLMSKTSVLPVRFGTVATGERAVNRFCSQYNAQLLEQLDRVQDRVEMGIKVTWNVPNIYDYFVDNHSELREERDRVYDGNKNPRRDDRINLGHMYDALVTEARLSHQTDLEEIILPGCDEIHSIPPKDEKVVVNLACLVQRADLEVFEERVVEAGKTLDNTYDIELNGPWAPHNFVELDLKTMTGRR

SEQ ID NO: 237 - protein, 273 aa, Serratia sp. ATCC 39006_gvpF
MMSIDKSRNHRAKVLYALCVSDDSTPNYKIRGLEAAPVYSIDQDGLRAVVSDTLSTRLRPERRNITAHQAVLHKLTEEGTVLPMRFGVIARNAEAVKNLLVANQDTIREHFERLDGCVEMGLRVSWDVTNIYEYFVATYPVLSETRDEIWNGNSNANNHREEKIRLGNLYESLRSGDRKESTEKVKEVLLDYCEEIIENPVKKEKDVMNLACLVARERMDEFAKGVFEASKLFDNVYLFDYTGPWAPHNFVTLDLHAPTAKKKTLTRAGTLSD

SEQ ID NO: 238 - protein, 260 aa, Stella vacuolata_ATCC-43931_gvpF
MQTEALAPAAVAAEGKYLYCIIDAPAPATFASPGIGGRGDVVHTLAVGRLAAVVSDTPRIEYENSRRNMMAHTKVLEEVMAHHTLLPVCFGTVGSGDDVIAEKILEGRREELSRLLEEMRGRVELGLKATWREEVIFAEVLDEDPAVRKLRDSLVGRSPEKSHFERIRLGELIGQALLRKRRDEEERILDRVRPFVRKTKLNKPIGDRMILNAAFLVETAREAALDQSVREMDADWGARLSFKYVGPVPPYNFVTITIHW

SEQ ID NO: 239 - protein, 254 aa, Thiocapsa rosea strain DSM 235 Ga0242571_11_gvpF
MQQAKRQDVAAGRYIYAIIPDRGDHSLGRIGLDESEVYTIGDGRVAAVVSDLSGGRIRPQRRNMAAHQEVLKQVLREVSPLPAAFGLMADDEAAIIRILKDNQDAFLNQLERVDGSLEMGLRMSWDVPNIFEYFVGAHPELQELRDDFFRDGSNLTQDQMITLGRSFERLLEQDREEYTEQVESVMRSCCREIKRNKCRTEKEVLHLACLVDRDAAGRFEQVVLQAARPFDNNYAFDFNGPWAPHNFVEMDIHV

SEQ ID NO: 240 - protein, 244 aa, Tolypothrix sp. PCC 7601_gvpF
MDAGLYLYGIFSDPIPPTVSLKGLDSQPVYSQVIEGFTFLYSDAKQEKYLASRRNLISHEKVLEQAMQEGFRTLLPLRFGLVVKNWETVISQLIQPCERQLRDLFQKLAGKREVSVKILWDTKAELQAMMQSNPDLKQKRDQMEGKNLSMEEVIEIGQLIESNLQQRKEAVIKTFFDELKPLAEEVVESEPMMEEMIYNAAFLIPWDQEALFSQRVEAIDKKFGDRLRIRYNNFTAPYTFAQIS

SEQ ID NO: 241 - protein, 266 aa, Trichodesmium erythraeum IMS101_gvpF
MEFGFYVYGLIQEKGKMDESKDESKNGLKGSNESKDELKGLDKEDVKIQDVDEFAVLYSIAKKERYLASRRNLITHEKVLESAMEAGYRNLLPMQFGLVVSEWEKFSQDFTKPCEQQIHDLFTKLKNNREVGIKIYWEPDAELEKLLENDKDLKEERDSLKDKKLTMDQVIDIGQKIEQGMNERKQNIIEIFQETLNKMAIEVIENEVQTEKMIYNAAYLIPWDQEEDFGEKVETIDSKLCERGNFTIRYNSFTAPYNFARIRQQD

SEQ ID NO: 242 - protein, 334 aa, Ancylobacter aquaticus strain UV5_gvpFL1
MTDLLVFAVVPADRFDPAILAEGDGLPPGLRAIAAGPLAAVVGAAPEGGLKGRERSALLPWLLASQKVMERLLANAPVLPVALGTVVEDEGRVRHMLDAGAAILGEGFQAVGDGIEMNLSVLWHLDTVVARLLPGVAPELRQAAAGGDAIERQALGVVLAGLVSAERRRARARVIEALQAVTRDFAIGEPTEPGGVVNLALLVDRAAEEALGAALEALDAEFDGALTFRLVGPLPPYSFASVQVHLSPAAAVCGARAALGVEPDASPETVKAAYRRAARETHPDLVPMGGEDEEAPEATADETSRFVVLSDAYRVLEGEHAPVSLRRLDSVLTE

SEQ ID NO: 243 - protein, 255 aa, Ancylobacter aquaticus strain UV5_gvpFL2
MLYVYAITADYAAGANHLLPAKGIVPGVPVQRFGTGALGAVASPVPVTVFGKEALHALLDDADWTRARILAHQRVVSSLLPLATVLPLKFGTLVAGEASLAAALTSQHDALDATVARLRGAREWGVKLFFEAPTRTIRAEEPVGAGAGLAFFRRKKEEQETRAAAEAALDRCVAASHRRLASHARAAVANPLQPPELHGHPGTMGLNGAYLVAAENEAAWRVCFSELEQAYAALGARYVRTGPWAAYNFTGGGLV

SEQ ID NO: 244 - protein, 337 aa, Aquabacter spiritensis strain DSM 9035_gvpFL1
MSGLLVFAIVPADRIEPGLLAPAEGLPPGLETVVAAGFAAIVGTAPEGGLKGRDRGSLLPWLLASQKVIERLMARGPVLPAALGSVLEDESRVRHMLVCGQAALAAAFETLNGCWQTDLSVRWDLSRTVAHLMTELPPGLRAAAETGDETARRSLGAALAGLVAGERRRIQSRIGAVLGAVARDLIVSDPVEPEGVVGVALLVDAPASAQVDAALDRLDGEFEGRLTFRLVGPLAPYSFATVQIHLGPAAGLAGAHAELGLEAGAPLEAVKAAYHRLIVGLHPDLVPHGSPGDDADDAASGKGGRAARFAAVTAAYRTLQAEHAPVSLRRQDGLSPG

SEQ ID NO: 245 - protein, 257 aa, Aquabacter spiritensis strain DSM 9035_gvpFL2
MLYVYAITADHPGPHDAGSLPGEGIVPGAPVRLLPFGDLAAAVSPVSAVDFGPEALPARLQDVDWTGQRVLAHQRVVDSLVDVATVLPMKFCTLFSGAAALRAALADNRAALEATVVRLRGAREWGVKLFWEAPPAEPAPVERGPGAGAAFFQRKRDAQRLRAEAEAALAHGVAESHRRLAARARAAVANPVQPAAVHRRRGEMALNGAYLVPRADEAAWRESLAELERTYAGAGIRYELTGPWGPYNFTGGGLAGS

SEQ ID NO: 246 - protein, 334 aa, Bradyrhizobium oligotrophicum S58_gvpFL1
MTMNLVGITTPDVAGAIAAAGGRLADVETRAVEAGGLVALLALSKAPFWHVLRRSRTALRSMLTAQRILEAAAVYGPLLPARPGTLIRNDAEACMLLRSQCRHLAEGLRLHGTSRQYQITISWDPVAALAARRDHQDLVEAAAASADGAADKAASMIQRFMSDQQARFEAEAMRALAAVAEDVITLPVNQPDMLMNAVVLLAPGAEPELERVLEALDRGLRGKNLIRLIGPLPPVSFAAVSIERPGRQRIAAARRLLGIGEATRTCDLRRAYLDKAHAHHPDTGGHAADASIVGAAAEAFRLLARVAEARASAGQDDVILVDIRRQDQQRSLST

SEQ ID NO: 247 - protein, 253 aa, Bradyrhizobium oligotrophicum S58_gvpFL2
MSKANLGIGLVHGVVTAQSAALLPQIVDAFDATEIIVVNTEQQALLISDIPQYLRGHVEADTLFSDPARISTLAMKHHRILQAAAVVTDVVPVRLGTLVRGPSGARDLLNREAVRFAGHLVTIHNALEFSVRILPTEQPSRRVARPVPSSGRDYLRIRRDERCGQRPAVVDITLQELASRAVAIRERQSASRSGGRTPALAEAAFLVDRHALAAFDDCAGRIERQIAENGLALDIFGPWPAYSFVDGARENLG

SEQ ID NO: 248 - protein, 214 aa, Bradyrhizobium oligotrophicum S58_gvpFL3
MSSPRLIGLLAADDVPADLADQIMSCGPVAAAIRFAPAAASSSESLDHHAAVVAWCRRAAFLPSRAGIPISPELLQSIARSAWYHRSTIEHIEGRVEISVELERRDGVRDGGIDGGGRAYLRATAHDLRACEVGVATAANLLAMYSERADADLIARTAPLPAIRLRASVLVRRAVAPRLARQFDSMLSAISDRLVCRVTGPWPPYSFSTIREPS

SEQ ID NO: 249 - protein, 252 aa, Burkholderia thailandensis sp. Bp5365 strain MSMB43_gvpFL
MVWLTYAVLTPKRSITLPPGVAGARLEIVDGAHLRTIVSEHPRAPSATIPSALDFGQTVAALFRHGAIVPMRFPTCLDSKQAVRDWLDDESDMYRDLLQRIDGCVEMGLRFRLPEAPRAQPRPQAGGPGHAYLAARGAPNSVARSHGERIAAVLRNLYRDWRFDGLVEGFVSLSFLVRQTTLDDFVDRCRQAARETAFPLYMSGPWPPYSFATDERSSAPEPHRALRLMRRPSTAVSISANVAAPEKKDSAR

SEQ ID NO: 250 - protein, 257 aa, Desulfobacterium vacuolatum-DSM 3385_gvpFL
MTLHLLYCVFSSGEMEKTRKLVPPGIDGEPVHEICSNKISGVVSTLGKPPDTHVKSLLAYHGVIDSYHQNRTVIPMRFAAVFRTYAHMITALNNNEKSYLLQLKRLHDCTEMCVRFISNSPCCVKKKEPAISPKKISGTTFLQQRKAMYEQQNRLPPEIHEKTRDILQHFRGLYMEFKQESQPLEKDCPSLSLQGAEKTDGNALLISLFFLISKKNISLFRSRFQNICGSSSGRHMMNGPWPPFNFINTESNLTDPS

SEQ ID NO: 251 - protein, 265 aa, Desulfomonile tiedjei DSM 6799_gvpFL
MLGSLAAIQFLSISSYGADEMKFLMYCIFTENSIEPPHSLVGVNRSPVRIISCDGLAAAVSVITQKEIPRDPATGLDYHKVIQWFHERIGVIPLRLGTCLGHESDVVQLLHSHGARYKSLLKELDGCVEMGIRVIHDRPGPQELASKSPFISRFNGTESGTDYLMRRKVLFDADEFAISRNREIVERYHSPFTGLYVSFKAQTSKFSPLGTDRNSVLTSLYFLIPRQSADSFRAIYGDLRSGLHERIMLSGPWPPYNFVLPEDCL

SEQ ID NO: 252 - protein, 279 aa, Enhydrobacter aerosaccus strain ATCC 27094_gvpFL
MEGHRIYIYGIVRDAADGGPAPVPPVAGLDGGALRAIAGYGLAAIASAVDLSKAGIPFEEQLKDPDRATALVLEHHRVLQQAIDAQTVLPMRFGALFQDDRGVTDALEKNRCGLMDALGRIDGAREWGVKIFCDRAVAARQLSATSAVVQAAEKELSGLAEGRAFFLRRRLERLRTEETDRAVAHEVDVSRQALCELARASAPLKLQPAAVHGRGEDMVWNGAFLVPRSGEERFLSRLEVVVQSRSDLGLHYEVTGPWPPFSFVDGQLEGGGDACPDGA

SEQ ID NO: 253 - protein, 278 aa, Octadecabacter antarcticus 307_gvpFL
MRSATSIVYAYGVLTNCSDIALDMPRSDLAGLVKNGPLRILPFGNIAAVVCDFVLPNGSDLETLLEDSRSAERLILNHHQVLSYIVSQHTILPLRFGAAFTEDAGVIAALGGRCSELQKALGRIDGALEWGVKTFCDRKLLKQRVRGTGSEISDLESEIAKQGEGKAFFLRRRKERLILEEVEEILEQCVVGTQEQLEPSVIEEALVKLQPPTVHGHEHDMLSNISYLIARGTEDAFMQSLEDLRLAHAPYGLEYQMNGPWPAYSFSDQQLEGGVNDQ

SEQ ID NO: 254 - protein, 278 aa, Octadecabacter arcticus 238_gvpFL
MSSATSIVYVYGVLTNCSDLVLDFPPGDLAGIVESGPLRILPFGDIGALVCDFILPDGSDLKTILEDSRSAERMILNHHLVLADMVSRYTILPLRFGAVFAEDAGVIAALGGRYSTLQKELDRIDGAIEWGVKSFCNRKMFSECVAETVSEISVLEKEIADQGEGKAFFLRRRIQRLILDEVEKTLEQCLVGAQDQLKSRAIEETLVKLQPPTVHGHKHEMVSNRSYLIARGAEDAFMQSLDDLRVVYAPFGFDYQINGPWPAYSFSDQQLGGGVNDK

SEQ ID NO: 255 - protein, 261 aa, Rhodobacter capsulatus SB 1003_gvpFL1
MGHYLYGLLAPPARGTLAQMQAAAAGVTSLGGPVALSAVEGMLLVHCPCDLAEISQTRRNMLAHTRMLEALMPLATCLPVRFGVIAQDLAEVARMIHERRAELVGHAQRLLDPVEIGLRVRFPRDRALAQLMAETPDFVAERDRLMGQGAGAHFARADFGRRLAEALDARRTRDQKRLLAALRPHVRDHVLRAPEEDVEVLRAEFLIPAAGVDAFSRIAHDLAAALGFAGAAEPELQVIGPAPPYHFLSLSLAFDNTSEAA

SEQ ID NO: 256 - protein, 316 aa, Rhodobacter capsulatus SB 1003_gvpFL2
MAHEIIAILPCEAAQLPSGLTGVVGRGATAVLAPAPGWAERLTGGPKQTAVRHHSRLEALMAMGSVLPFAAGIACTPEEAALLLRLDAPLIARLAAEIGPRRHFQLALDWDESRVLAAFRDSPELAPLFSGAAVTPEALRQAITALADRLSATALRLLDPVAEDPVEQPRAPGCLLNLVFLLRPEDEPRLDAALQAIDALWSEGLRLRLIGPSAPISHALVDIDRADVAALAAAADLLKVAPEAGPEAVTEAAKAALRSPDLAANAAEQIRAAARLLLRAGDIAALGLSGAATLPHLVHLRPGGRKSGLTSSGEAA

SEQ ID NO: 257 - protein, 231 aa, Rhodobacter capsulatus SB 1003_gvpFL3
MTGLALHGFVSPDGWSAAAAPPARCAVVLGGVAALVSEAGDALDTPETAQAAALAHHALISAWHRRGPVLPVRLGTVFSSQAALQTALAPKAAQLRAALDALADKEEMVLTIVPAARPPDLPPPAATGADWLRARKAVRDRGQARQTDRQQTLAGLQDALRAQGVASLAAPAPREGGSRWHLLIARDDGAGLDRWLAAQADRFDAAGLDLTLDGPWPPYRFAAEILEALDG

SEQ ID NO: 258 - protein, 220 aa, Rhodobacter capsulatus SB 1003_gvpFL4
MSEPRISGLAPWRADLPDVIGCHGGWVLMGAAADETPEARLRRQVGWCRAAVDVLPLSPRLAPTRAEAERLVATRGPDLERAHRHIRGRLQVIVQLEMCRTDLGLVRREISGGRSWLQDRAERATREARANADFEAQVRRVVRALFPREGQVVTLAPSGTAGQLRLRRAVLVPRAGLQAFAAALSADLDRDGRGGLWDVIAPLPPLAFAALEAGPGGAVT

SEQ ID NO: 259 - protein, 254 aa, Rhodobacter sphaeroides 2.4.1_gvpFL1
MIYLYGLLEEPASGHEVLAGMAGVTGPIALARLPGGILIYSSATEADILPRRRLLLAHTRVLEAAAWFGNLLPMRFGMMASTLAEVAAMLASRLTELCAAFDRVRGRVELGLRLSFPREPALAATLATAPDLAAERARLLALRRPDPMAQAEFGRRLAERLDARRGETQRLLFQSLRPLWVDHRLRVPDSDVQVIAVDVLVEDGAQDRLAAALVKAAADCSFAPTAEPSVRVIGPVPLFNFVDLVLSPRREEVA

SEQ ID NO: 260 - protein, 291 aa, Rhodobacter sphaeroides 2.4.1_gvpFL2
MRLREVVAVLEGHPPSVLPEGTEAICEAGLTAILGMPPGLLSGRRALLEHAACRQAVLERLMAFGTVLPVLTGNCLTPAEAAAALAANSPRLRQELRRLAGRVQFQVLVQWHAALVPKRTDPDETAEDLRLRFTHRIADALARVAERHVNLPLREDMLANQALLLLQTRTDDLDRSLEQIDALWTEGLRIRRIGPSPPVSFASLNFRRVSSAAIRRARHRFDLEGPVDPIRLRALRRDLLLRASEAERAEILAAAAVLDLLTRCAASGGDLHLVRIWSEGQAVPSDLEDAA

SEQ ID NO: 261 - protein, 232 aa, Rhodobacter sphaeroides 2.4.1_gvpFL3
MSGLLLLGVVSGLGISPAITSPHLRLDGDGYAAILLSLDRLPPDPASPDWAVQAALAQNAILSAYAATEDVLPVALGAAFTGIAAVKRHLDAERATLDAGMERLAGRAEYVAQLIAEQVADGAAPAPASGSAFLKARSARHEQRRHLARERTGFARATAEELASLSCSASARPLKPDGPLLDLSLLVARDRVPGLLEAAEASSRAGSRLALSVRLIGPCAPFSFLPETRGHD

SEQ ID NO: 262 - protein, 169 aa, Rhodobacter sphaeroides 2.4.1_gvpFL4
MAGDARSRVRLHLAAMRDCETFLPFPPAATIAVDEAIAWCGRRTNALAEEIDRFSRQRQLTVSARLIAPLLPDAAASGAGWLRARRDASAHQARLRTVLMQIMSLLGEVRCIPGRLQDEVQVNLLVPAAETHPVLHELRERLRVGDALWSACTVTGPWPPYAFISWETA

SEQ ID NO: 263 - protein, 260 aa, Rhodococcus hoagii 103S_gvpFL1
MSEQESAPDGGGPVVYVYGLVPADVEVKEDATGIGSPPRPLKIVHHEDVAALVSEIDPDTPLGSSDDLRAHAAVLDSTATVAPVLPLRFGAVLTDTDAVVAELLEPYRDEFHEALEQLEGKVEFVVKGKYVEDAILREILADDPEAARLRDVVREQPEDTTRDERLALGERISQALTAKREQDTGRIVEALQPAATAVAPREPTDDEEAGSVAVLISADGVDELDKAVARLIDDWQGRVEVTVTGPLAAYDFVKTRAPGT

SEQ ID NO: 264 - protein, 259 aa, Rhodococcus hoagii 103S_gvpFL2
MTPDDGVWVYAVTGDGSFPGGISGIRGVAGEELRTVTDSGFTAVVGTVRLDTFGEEALRRNLEDLDWLADTARRHDAVVAAICAGGATVPLRLATVYFDDDRVRTMLRDNAEQLGEALQQIADRSEWGVRAYLERPRSEPRDAREKTGRPSGTAYLMQRRAQVAAREQAESAAGRRADEIFAELARWAVAGVRQPPSPPDLAGRRSQEILNTSFLVDNGRHREFVTAVEELDARLSDVDLVLTGPWPPYSFTSVEASAR

SEQ ID NO: 265 - protein, 222 aa, Serratia sp. ATCC 39006_gvpFL
MSLLLYGIVAEDTQLALEPDGSPHAGEEPMQLVKAATLAALVKPCEADVSREPAAALAFGQQIMHVHQQTTIIPIRYGCVLADEDAVTQHLLNHEAHYQTQLVELENCDEMGIRLSLASAEDNAVTTPQASGLDYLRSRKLAYAVPEHAERQAALLNNAFTGLYRRHCAEISMFNGQRTYLLSYLVPRTGLQAFRDQFNTLANNMTDIGVISGPWPPYNFAS

SEQ ID NO: 266 - protein, 362 aa, Stella vacuolata-ATCC-43931_gvpFL1
MSGLLVFAIVPADGIEPGILAPREELPANLRAVAADGFAAVVGAAPEGGLKGRDRSVLLPRLLASQKVIERLMARGPVLPVTLGTVLEDEARVRHMLAAGAPMLEAAFGTLGDCWQMDLSVRWDLNQVVARLMGEVPGDVRAAAGSGDEAARRALGEALAGLAAGERRRVQSRLAAALRDVARDLIVSEPVEPESVVDIAILVERPALAEVEAALDRLDAEFEGRLKFRLVGPLAPHSFATVQVHLAPEAALAGACAELGVERGAGLQDVKVAYHRALVRFHPDLAPHGDDGGPEDEHDGGEGRASRLLTVTAAYRALQAEHAPISLRRQDGIAVNQEQDASAAMGQQRGIVPGRELQALRM

SEQ ID NO: 267 - protein, 258 aa, Stella vacuolata-ATCC-43931_gvpFL2
MLYVYAIAADHPDPDNAMFGGEGIVPDAPVRLLQLGDLAVAASLVSAADFAADALRAHLEDARWTALRVLAHQRVVDSLLPHATVLPMKFCTLFSGEAALKQALAHNRAALQATVERLRGAREWGVKLYWEAPRNPAPPSAGQGEAGAGAAFFQRKRDQQRQRAEAEAAVARCVAASHRRLADAARAAVANPVQPPAVHRQPGEMALNGAYLVARAAEPAWREVLAELERTHADGGIRYELTGPWGPYNFTGSGLVGS

SEQ ID NO: 268 - protein, 253 aa, Thiocapsa rosea strain DSM 235 Ga0242571-11_gvpFL
MSDRPRPMLHCILRSPPGSIARAEAGLRWIERDGLAALVADREPSEIAGASSVGLQRYADIVAEIHACAAVIPVRFGCLLAGDEAVGKLLHRSRDRLHGLLDQVGDCLEFGIRLLLPADAPAATDDDAAPRLHANAPSDPRADPDMGPGLSHLLAIRHRLDVEASLAARAREAREVIKGRVAGRFREVREELGQIDGRSLLSLYFLVPREQGEHFVECLRQDASSLRGTGLLTGPWPPYNFVGAIDDDIRSLD

SEQ ID NO: 269 - protein, 119 aa, Anabaena-flos-aquae_gvpG
MLTKLLLLPIMGPLNGVVWIAEQIQERTNTEFDAQENLHKQLLSLQLSFDIGEIGEEEFEIQEEEILLKIQALEEEARLELEAEQEEARLELEAEQEDFEYPPQFTAEVNKDQHLVLLP

SEQ ID NO: 270 - protein, 88 aa, Bacillus-megaterium_gvpG
VLHKLVTAPINLVVKIGEKVQEEADKQLYDLPTIQQKLIQLQMMFELGEIPEEAFQEKEDELLMRYEIAKRREIEQWEELTQKRNEES

SEQ ID NO: 271 - protein, 83 aa, Ancylobacter aquaticus strain UV5_gvpG
MGMLTDVVFAPAVGPLKGVLWLARIIAEQAERTLYDEGVIRAALLDLEQQLEAGEIDEDAYETQETVLLERLKIARERMRSGL

SEQ ID NO: 272 - protein, 122 aa, Aphanizomenon flos-aquae NIES-81_gvpG
MLTKLLLLPIMGPLNGLVWIGEQIQERTNTEFDAQENLHKQLLNLQLSFDIGEISEEDFEIQEEELLLKIQALEEEARLELELAEEEARLELELEQEEEEDFVVKPQLTTEIDRDKDLVLLP

SEQ ID NO: 273 - protein, 86 aa, Aphanothece halophytica (strain PCC 7418)_gvpG
MVFKLLLLPITGPIEGVTWLGEQILERANQELDEKENLNKRLLSLQLSLDLGEISEEEYDEQEEEILLAMQAMEDEENNQAEEETD

SEQ ID NO: 274 - protein, 83 aa, Aquabacter spiritensis strain DSM 9035_gvpG
MSLVTDVLFAPAVGPLKGVLWLARLIAEQAERTLYDEDVLRAALLDLEQRFEAGEISEADYETEEDILLARLKIARERMRSGL

SEQ ID NO: 275 - protein, 82 aa, Bradyrhizobium oligotrophicum S58_gvpG
MLFQILTSPVSGPFRMVSWIGGAIRDAVDTKMNDPAEIKRALAALEQQLEAGSLSEQDYERMEMELIERLQSSLRHGSGNGG

SEQ ID NO: 276 - protein, 75 aa, Burkholderia thailandensis sp. Bp5365 strain MSMB43_gvpG
MFILDNLLAAPIKGMFWIFEEIAQAAEEETIADIEMIKAALVELYRELESGQIDETEFETRERALLDRLDSLETS

SEQ ID NO: 277 - protein, 78 aa, Chlorobium luteolum DSM 273_gvpG
MFILDDILLAPLSGMVFLGRKINEIVQNEMSDEGAVKEQLMKLQFRFEMDELSEEEYDRLEDELLSTLAEIRAQKENR

SEQ ID NO: 278 - protein, 83 aa, Dactylococcopsis salina PCC 8305_gvpG
MVFKLLLLPITGPIEGITWLGEQILERADQELDSKENLNKRLLSLQLSLDLGEISEEEYDEQEEEILLAMQAMEDEENEEEES

SEQ ID NO: 279 - protein, 77 aa, Desulfobacterium vacuolatum_DSM 3385_gvpG
MFLVDDILFFPAKSLVWVFRELHNAVQQEKTNESDALTTELSELYMMLETGKITEEEFDEREEQILDRLDEIQERDQ

SEQ ID NO: 280 - protein, 86 aa, Desulfomonile tiedjei DSM 6799_gvpG
MERYTMFLLDDILFLPMNGVLWICNEIHDAAEQELHNESDAITAQLQKLYTLLEAGDIGESEFDVLEAELLDRLDAIQERGALLEA

SEQ ID NO: 281 - protein, 83 aa, Desulfotomaculum acetoxidans_DSM 771_gvpG
MLGKLLLSPILGPVMGVKFIAEKIKQQADQELYDKSKIKQDLMELQIKLELEEITEEYYLQREEELLVRLDELASMETEEEEV

SEQ ID NO: 282 - protein, 129 aa, Dolichospermum circinale_gvpG
MLTQLLLLPIMGPLNGVVWIAEQIQERTNTEFDAQENLHKQLLSLQLSFDIGEISEEEFEIQEEEILLKIQALEEEARLELEAEQEEARLELEAEQEQARLELEAEQEELENQPQLTPKIDTYRHLVKL

SEQ ID NO: 283 - protein, 81 aa, Enhydrobacter aerosaccus strain ATCC 27094_gvpG
MGMLARLLTLPVSAPVGGVLWIARKIEEEANAERWDRNKITGALSELELELDLGAIDVEEYDAREAVLLQKLKELQEVEND

SEQ ID NO: 284 - protein, 103 aa, Isosphaera pallida_ATCC-43644_gvpG
MFLVDDILLAPAHSLMFLLREIHQAALEELRRDAQKVREELAECYRALETGALTDEEFASLETDLLDRLDALEELARFNSDEDDDPEDEDWDVEDDDPAEAVW

SEQ ID NO: 285 - protein, 77 aa, Legionella drancourtii LLAP12_gvpG
MLLLGSILMAPVHGLMAIFEKIKEAVDEEKQHDIERIKSELMALYTKLESGELSEADFEKQEKILLDKLDSLEDEDD

SEQ ID NO: 286 - protein, 86 aa, Microcystis aeruginosa NIES-843_gvpG
MFLDLLFLPVTGPIGGLIWIGEKIQERADIEYDEAENLHKLLLSLQLSYDMGNISEEEFEIQEEELLLKIQALEEEEAENESESSL

SEQ ID NO: 287 - protein, 84 aa, Nostoc punctiforme ATCC 29133_gvpG
MVLRFLLLPITGPLMGVTWLGEKILEQASTEIDDKENLSKQLLALQLAFDMGEIPEEEFEIQEEALLLAILEAEQEERDQTQEY

SEQ ID NO: 288 - protein, 125 aa, Nostoc sp. PCC 7120_gvpG
MLGKILLLPVMGPINGLMWIGEQIQERTNTEFDAQENLHKQLLSLQLKFDMGEISEEEFDIQEEEILLKIQALEAEERLNAESEEDDDLDVQPIFILASEENPVYQDQSRFSEEYEDKEDLVLSP

SEQ ID NO: 289 - protein, 84 aa, Octadecabacter antarcticus 307_gvpG
MGIILNTLMSPLIGPMKGVFWVAEQIKDQTDAEIYDDSKILVELSELELLLDLEKIELKDFEAKEDVLLKRLQEIRKAKKNDSV

SEQ ID NO: 290 - protein, 84 aa, Octadecabacter arcticus 238_gvpG
MSIILNTLMGPLIGPMKGLLWVAEQIKDQADAELYDDSKILVALSELELSFDLEQIELKEFEAQEDVLLQRLQAIRKAKQNDTD

SEQ ID NO: 291 - protein, 78 aa, Pelodictyon phaeoclathratiforme_gvpG
MFILDDILFAPLNGLIFIAKKINDVVEKETSDEGVVKERLMALQLRFELDEIDEVEYDREEDELLQKLERIRLNKQNQ

SEQ ID NO: 292 - protein, 81 aa, Phormidium tenue NIES-30_gvpG
MLFKLLFAPVLGPIEGISWVANKLLEQADVPTNDLESLQKQLLALQLAFDMGEVAEADFEIQEEEILLAIQAIEDEEDEDE

SEQ ID NO: 293 - protein, 85 aa, Planktothrix agardhii str. 7805_gvpG
MILRLLLSPITAPFEGVIWIGEQLLERAEAELDDKENLGKRLLALQLAFDMGDIPEEDFEVQEEELLLQIQALEDEANQENDEID

SEQ ID NO: 294 - protein, 149 aa, Psychromonas ingrahamii 37_gvpG
MFILDDILLAPYSGIKWLFKEIQRQAQEELDGEADRITTDLTNLYRQFESNEITEQEFEERETVLLDRLDELQEESNLLDEEYDEEYEDDDEEYEDDDEEYEDDDEEYEDDDEEYEDDDKNDKDKNDDHDNDDDDENKDENDKYNDEER

SEQ ID NO: 295 - protein, 85 aa, Rhodobacter capsulatus SB 1003_gvpG
MGLLRKLLLAPVELPITGALWIVEKIAETAESELTDPGTVRRLLRGLEQQLEAGEITEEEYEFAEEILLDRLKRGQAAEARSGGP

SEQ ID NO: 296 - protein, 77 aa, Rhodobacter sphaeroides 2.4.1_gvpG
MGLLTSLLTLPFRGPFDGTLWIAARIGEAAEQSWNDPAALRAALVEAERQLLAGELSEETYDAIELDLLERLKGTAR

SEQ ID NO: 297 - protein, 83 aa, Rhodococcus hoagii 103S_gvpG
MGLFSAIFGLPLAPVRGVVWIGEVVRRQVEEETTSPAAMRRDLEAIEEGRRSGEISEDEAAQAEDEILHRVTRRRDAGASGEE

SEQ ID NO: 298 - protein, 138 aa, Serratia sp. ATCC 39006_gvpG
MLLIDDILFSPVKGVMWIFRQIHELAEDELAGEADRIRESLTDLYMLLETGQITEDEFEQQEAVLLDRLDALDEEDDMLGDEPGDDEDDEYEEDDDEEDDDEEDDDDEDDDDEDDDDEEDDDDDEDDDDEDEPEGTTK

SEQ ID NO: 299 - protein, 83 aa, Stella vacuolata_ATCC-43931_gvpG
MGLVTNVAFAPVVGPLKGVLWLARLIADQAERTLYDEDLVRAALLDLEQRLDAGQISEADYDAEEEILLARLKIARERMRSGL

SEQ ID NO: 300 - protein, 98 aa, Thiocapsa rosea strain DSM 235 Ga0242571_11_gvpG
MLIVDDLLAAPFKGIIWVFEEIHKSATAEQRARRDEIMAALSALYRALEQGEITDDTFDTREQALLDELDALDAREDANELGSDEDEDDLDGAGEDAS

SEQ ID NO: 301 - protein, 132 aa, Tolypothrix sp. PCC 7601_gvpG
MEVMIMLGKILLFPVMGPISGLMWIGEQIQERTDTEFDAQENLHKQLLSLQLSFDIGEISEEDFEEQEEELLLKIQALEEEKARLEAESIEDEEDEVEPTYFIAEVEEDKVLAEAFRGNKKYEDNENLVLSP

SEQ ID NO: 302 - protein, 85 aa, Trichodesmium erythraeum IMS101_gvpG
MLLRLLTLPISGPLEGVTWLGKKLQEQVDTEIDETENLSKKLLTLQLAFDMGEISEEDFEDQEEELLLAIQALEEQKLKEEEEDA

SEQ ID NO: 303 - protein, 248 aa, Anabaena-flos-aquae_gvpJ
MLPTRPQTNSSRTINTSTQGSTLADILERVLDKGIVIAGDISISIASTELVHIRIRLLISSVDKAKEMGINWWESDPYLSTKAQRLVEENQQLQHRLESLEAKLNSLTSSSVKEEIPLAADVKDDLYQTSAKIPSPVDTPIEVLDFQAQSSGGTPPYVNTSMEILDFQAQTSAESSSPVGSTVEILDFQAQTSEESSSPVVSTVEILDFQAQTSEESSSPVGSTVEILDFQAQTSEEIPSSVDPAIDV

SEQ ID NO: 304 - protein, 100 aa, Bacillus-megaterium_gvpJ
MAVEHNMQSSTIVDVLEKILDKGVVIAGDITVGIADVELLTIKIRLIVASVDKAKEIGMDWWENDPYLSSKGANNKALEEENKMLHERLKTLEEKIETKR

SEQ ID NO: 305 - protein, 120 aa, Ancylobacter aquaticus strain UV5_gvpJ1
MNEQRMEHSLQAVGLADILERVLDKGIVIAGDITISLVEVELLNIRLRLVVASVDRAMSMGINWWQSDPHLNSHARELAEENKLLRERLDRLEAAVVPSALPADAALEPSLAGEDARHGG

SEQ ID NO: 306 - protein, 72 aa, Ancylobacter aquaticus strain UV5_gvpJ2
MPSRHSGEIAVADLLDRALHKGLVVWGEATISVAGVDLVYLGLKLLLTSTDTVNRMREAANAPPDERHLHAD

SEQ ID NO: 307 - protein, 157 aa, Aphanizomenon flos-aquae NIES-81_gvpJ
VTSTPILPTRPQTNSSRAINTSTQGSTLADILERVLDKGIVIAGDISISIASTELIHIRIRLLIASVDKAKEMGINWWETDPYLSTKAQRLVEENQQLQNRLENLESQINLLTSAKVQEQISLVETTEDNTHQTTEDNTHQTHEESIPLPIDSQLDV

SEQ ID NO: 308 - protein, 128 aa, Aphanothece halophytica (strain PCC 7418)_gvpJ
MVNPNTNKPKSYQSKGITNSTQSSSLADILERVLDKGIVIAGDITVSVGSTELLSIRIRLLVSSVDKARELGINWWEGDPYLSSQANLLKEENQALQNRLENMEAELRRLKGETNPEPSFLSESEDNS

SEQ ID NO: 309 - protein, 114 aa, Aquabacter spiritensis strain DSM 9035_gvpJ1
MSEQRMEHSLQAVGLADILERVLDKGIVIAGDISISLVEVDLLNIRLRLVVASVDRAMSMGINWWQSDPHLNSHARQLEEENRLLRERLDRLEAALAPPEGGMLRAEVEVAHGG

SEQ ID NO: 310 - protein, 78 aa, Aquabacter spiritensis strain DSM 9035_gvpJ2
MPDPEPIIPRTSGDVALADLLDRALHKGLVLWGEATISVAGVDLVYLGLKVLLASTDTANRMRDAAAASAAGSHLPGG

SEQ ID NO: 311 - protein, 127 aa, Arthrospira platensis NIES-39_gvpJ
MTLQSRSSSPQRGVPMSTSGSSLADILERVLDKGIVIAGDISVSVGSTELLSIRIRLLIASVDKAKEIGINWWESDPYLSSQAQQLSQSNQQLLEEVKRLQEEVRSLKALTSQSSQPVTPPNSENDD

SEQ ID NO: 312 - protein, 119 aa, Bradyrhizobium oligotrophicum S58_gvpJ1
MTFTVHQPTGGDRLADILERVLDKGIVVAGDVTISLVGIELLNIKIRLIVATVDRALELGINWWEADPRLTTRASELSVENEELKKRLALLEADAGRNQRPRKRRVRSIAATSGASHER

SEQ ID NO: 313 - protein, 81 aa, Bradyrhizobium oligotrophicum S58_gvpJ2
MTYRADLDYLEPAASSEGSLLELLDHLLDRGVLLWGELRISVADVELIEVGLKLMLASARTADRWRQTTTQRASIAPGDCP

SEQ ID NO: 314 - protein, 74 aa, Burkholderia thailandensis sp. Bp5365 strain MSMB43_gvpJ1
MRSADGEPVSAELAQRLSLCESLDRILNKGAVISAQVVVSVADVDLLYLHLRLLLTSVETALVGRAMPREEASR

SEQ ID NO: 315 - protein, 89 aa, Burkholderia thailandensis sp. Bp5365 strain MSMB43_gvpJ2
MADLLERVLDKGVVITGDIRINLVDVELLTIRIRLLVCSVDKAKELGIDWWNADTFFLGPDRGQSALPGRASAVDVAAGSAVHADAAHR

SEQ ID NO: 316 - protein, 97 aa, Chlorobium luteolum DSM 273_gvpJ1
MPELKHAVNATGLADILERVLDKGIVIAGDIKIQIADIDLLTIKIRLMVASVDKAIEMGINWWQEDPYLSTGAKTSEQTRLLGEINQRIEKLESINR

SEQ ID NO: 317 - protein, 69 aa, Chlorobium luteolum DSM 273_gvpJ2
MQEDLYTANRQVTLLDILDRVLNKGVVISGDIIISVAGIDLVYVGLRVLLSSVETMERLDAARAEGLQQ

SEQ ID NO: 318 - protein, 68 aa, Chlorobium luteolum DSM 273_gvpJ3; identical to SEQ ID NO: 199

SEQ ID NO: 319 - protein, 68 aa, Chlorobium luteolum DSM 273_gvpJ4; identical to SEQ ID NO: 199

SEQ ID NO: 320 - protein, 130 aa, Dactylococcopsis salina PCC 8305_gvpJ
MVNSNTNQPKSYQSKGITNSTQSSSLADILERVLDKGIVIAGDISVSVGSTELLTIRIRLLISSVDRAREIGINWWESDPYLSSQAHLMKEENQALQSRLENMEAELRRLKGETNLDQSSLGESDQRSLQ

SEQ ID NO: 321 - protein, 74 aa, Desulfobacterium vacuolatum_DSM 3385_gvpJ1
MAYIDIDNDASKQISICEALDRVLNKGAVITGELTISVADIDLIYLSLQAVLTSVETARHMFDSQINDAVKEVK

SEQ ID NO: 322 - protein, 105 aa, Desulfobacterium vacuolatum_DSM 3385_gvpJ2
MPIQRTAQHSIESTNIADLLERVLDKGIVIAGDIKISLVDIELLSIQLRLVICSVDKAKEMGMDWWVNNPVFMPNKGTQNDEIADTLTKINSRLEHLEKATISGS

SEQ ID NO: 323 - protein, 73 aa, Desulfomonile tiedjei DSM 6799_gvpJ1
MMDEEEHVSLCEALDRVLNKGAVIAGEVTISVANVDLIYLGLQVVLASVDTIRGKRNELLRHDVGLHLTADNA

SEQ ID NO: 324 - protein, 81 aa, Desulfomonile tiedjei DSM 6799_gvpJ2
MSIQASTRHSIQSTNLADLLERVLDKGVVIAGDIKIKLVDVELLTIQIRLVVCSVDKAKEMGMDWWTNNPAFQPALAQISE

SEQ ID NO: 325 - protein, 123 aa, Desulfotomaculum acetoxidans_DSM 771_gvpJ1
MGPQMGPIKSTGNLSLLDVIDRILDKGLVINADISVSIVGVELLGIKIKAAVASFETAAKYGLQFPTGTEINEKVSEAAKQLKEICPECGKKSGRDELLHEGCPWCGWISARALRLETEHSQR

SEQ ID NO: 326 - protein, 78 aa, Desulfotomaculum acetoxidans_DSM 771_gvpJ2
MLPIREERATLTDLLDRVLDKGLLLNADILISVAGVPLIGITLKAAIAGMETMKKYGLLIDWDQESRLAERRLRSSRH

SEQ ID NO: 327 - protein, 108 aa, Enhydrobacter aerosaccus strain ATCC 27094_gvpJ1
MAVTNGRMEHSIQGSSLADILDRILDKGIVIAGDVTISLVGVELLNIRLRLLVASVDKAIEMGINWWEADPYLTSQTKASSEQTELLQQRLERIEGLLAGQATKEQPL

SEQ ID NO: 328 - protein, 74 aa, Enhydrobacter aerosaccus strain ATCC 27094_gvpJ2
MPVQTAHDGELALADLLDRALNKGVVLWGDATISLAGVELVYVGLRVLVASCSTMEKYRSSPRKGSMPIARGES

SEQ ID NO: 329 - protein, 98 aa, Isosphaera pallida_ATCC-43644_gvpJ1
MIVCSSSTPERIGPPMNLPPPHHAPWCYDSPDLETLPLDPAERIALCEVLDRVLNKGVVIHGEITISVAGVDLVYLGLNLLLTSVETAQSWKFRGMIE

SEQ ID NO: 330 - protein, 171 aa, Isosphaera pallida_ATCC-43644_gvpJ2
MAITRSSRPDVTHSTSGATLADVLERVLDKGLVIAGDIKIKLVDVELLTIQIRLVVASVDKAREMGLDWWTRSPELSSLAATTCPALTPPKQEATPPATRIQAPTESAQTTPDQSHPSDPSASNIDEVAELRRHIELMQLRDEARQRAHREELAALRAQLTRLTELLDSPR

SEQ ID NO: 331 - protein, 61 aa, Legionella drancourtii LLAP12_gvpJ1
MIIEDKPVSLCETLDRVLNKGVVVAGTVTISVADVDLLYLDLHCLLSSMKGMNLIGSERER

SEQ ID NO: 332 - protein, 106 aa, Legionella drancourtii LLAP12_gvpJ2
MELQKSPTHSIGSTTIADLLERILDKGIVIAGDIKVNLVQVELLTIQIRLLICSVDKAKEIGMDWWTHQNDVQSKNGSMPIQEYVTQMEERLKNLENTLASSKNAI

SEQ ID NO: 333 - protein, 114 aa, Lyngbya confervoides BDU141951_gvpJ
MTGQSLSRSSSANRQMATATQGSTLVDVLERVLDKGIVIAGDISVSVGSTELLTIRIRLLVASVDKAREMGINWWENDPYLSARSQELLTANEQLQSRIESLEQELKSLRSQED

SEQ ID NO: 334 - protein, 136 aa, Microcystis aeruginosa NIES-843_gvpJ
MTSSTFAGSLRNQSNNSLKTATQGSSLADILERVLDKGIVIAGDISVSIASTELINIRIRLLIASVDKAREMGINWWEGDPYLHSQSQALLAENRELSLRLQTLETELETLKSLTQLSAMESHDTSPNDEAHSSDA

SEQ ID NO: 335 - protein, 116 aa, Nostoc punctiforme ATCC 29133_gvpJ
MSTNTNRGAITTSTQGSTLADILERVLDKGIVIAGDISISVGSTELLNIRIRLLISSVDKAKEIGINWWESDPYLNSQTRTLLATNQQLQERLASLETELQSLKALNPINHQNAGD

SEQ ID NO: 336 - protein, 148 aa, Nostoc sp. PCC 7120_gvpJ
MTTTPIHPTRPQTNSNRVIPTSTQGSTLADILERVLDKGIVIAGDISISIASTELIHIRIRLLISSVDKAREMGINWWENDPYLSSKSQRLVEENQQLQQRLESLETQLRLLTSAAKEETTLTANNPEDLQPMYEVNSQEGDNSQLEA

SEQ ID NO: 337 - protein, 112 aa, Octadecabacter antarcticus 307_gvpJ1
MNDGKMEHSLNATNLADILERVLDKGIVIAGDVTISLVGVELLNIKLRLLIASVDKAMEMGINWWAHDPFLTAGAQAPAVADPAMLERMDRLEAALATALASNQTTPMKGHK

SEQ ID NO: 338 - protein, 74 aa, Octadecabacter antarcticus 307_gvpJ2
MTNKAQGGQDLALADLLDRALSTGVVIWGEATISLAGVDLVYVGLKVLVASVDAAERMKAASLVDRPTDRGQQI

SEQ ID NO: 339 - protein, 113 aa, Octadecabacter arcticus 238_gvpJ1
MNNGKMEHSLDATNLADILERVLDKGIVIAGDVTISLVGVELLNIKLRLLIASVDKAMEMGINWWAHDPYLTAGAQAPVGVDPAMLERMDRLEAALAKALASNQTTPAEGQSS

SEQ ID NO: 340 - protein, 72 aa, Octadecabacter arcticus 238_gvpJ2
MTNETQGGQDLALADLLDRALSTGVVIWGEATISLAGVDLVYVGLKVLVASVDAAQRMKDASLVDRPTDGGQ

SEQ ID NO: 341 - protein, 99 aa, Pelodictyon phaeoclathratiforme_gvpJ1
MPELKHAVNATGLADILERVLDKGIVIAGDIKIQIADIDLLTIKIRLLIASVDKAMEMGINWWQEDTYLSTKAKDKEQQLLRDDLQQRIEKLEALTKIT

SEQ ID NO: 342 - protein, 66 aa, Pelodictyon phaeoclathratiforme_gvpJ2
MQDEFYSKNKEITILDVLDRVLTKGVVITGDIVISVADIDLVYVGLRLLLSSVETMEKNKQNSIKM

SEQ ID NO: 343 - protein, 101 aa, Phormidium tenue NIES-30_gvpJ
MATATQGSSLVDVIERVLDKGIVIAGDISVSVGSTELLSIRIRLIISSVDKAREIGINWWESDPYLSSRTNELLEANQQLQSRLETLEAELKALRSAEPVS

SEQ ID NO: 344 - protein, 125 aa, Planktothrix agardhii str. 7805_gvpJ
MNSQQLPSNIQRGVPTSTQGSSLADILERVLDKGIVIAGDISVSVGSTELLNIRIRLLIASVDKAREIGINWWESDPYLSSQTKVLTESNQQLLEQVKFLQEEVKALKALLPQENQPNPISDPHK

SEQ ID NO: 345 - protein, 121 aa, Planktothrix rubescens_gvpJ
MNSQQRPSNIQRGVPTSTQGSSLADILERVLDKGIVIAGDISVSVGSTELLNIRIRLLIASVDKAREIGINWWESDPYLSSQTKVLTESNQELLEQVKLLQEEVKALKALLPQENQPKEME

SEQ ID NO: 346 - protein, 72 aa, Psychromonas ingrahamii 37_gvpJ1; identical to SEQ ID NO: 191

SEQ ID NO: 347 - protein, 74 aa, Psychromonas ingrahamii 37_gvpJ2
MPMANVSINPELTAQECEKISLCDALDRIINKGVVIHGEITISVANVDLISLGVRLILSNVETREQSNTPKEEV

SEQ ID NO: 348 - protein, 101 aa, Psychromonas ingrahamii 37_gvpJ3
MATGKPQSMTHSVKSTTVADLLERILDKGIVVTGDIKIKLVDVELLTVELRLVICSVDKAVEMGMDWWNNNPAFAPQAPAQEGELSSIEKRLEKIEKALVK

SEQ ID NO: 349 - protein, 151 aa, Rhodobacter capsulatus SB 1003_gvpJ1
MGYRSASQPEGLADVLERILDKGIVIAGDVSVSLVGIELLTIRLRLLIATVDKAREMGIDWWSHDPYLNGRLRPGEPAPETETETAALRDRLAQLEAQLSALGAQVGAAPALAEPALRGLAAAGSSALCAAPEASSADVVQPVFRRYKEAP

SEQ ID NO: 350 - protein, 69 aa, Rhodobacter capsulatus SB 1003_gvpJ2
MDDRFSLRLFGPEEVFDAPSGGLADLLDGLLGHGIVLHGDLWLTVADVELVYVGLSAVLASPEALRSHE

SEQ ID NO: 351 - protein, 104 aa, Rhodobacter sphaeroides 2.4.1_gvpJ1
MSFQMQSPLQQDSLADVLERILDKGIVIAGDISISLVGIELLTIRLRLLVATVDKAREMGINWWESDPRLCITQAPASDGSAALLDRLERIETQIGQLAAAREG

SEQ ID NO: 352 - protein, 74 aa, Rhodobacter sphaeroides 2.4.1_gvpJ2
MTDSAPTLQFATAEEALQSSETRLVDVVDALLSQGIAIRGELWLTIADVDLVFLGLDLLLANPDRLQCRVPDAA

SEQ ID NO: 353 - protein, 137 aa, Rhodococcus hoagii 103S_gvpJ
MTRSGSGANYPQQYSQGLGGAGHEPANLGDILERVLDKGIVIAGDIRVNLLDIELLTIKLRLVIASLETAREVGIDWWEHDPWLSGNNRDLELENERLRARIEALESGERRVADVTDPHRAVQPAESPAAEVRDDDA

SEQ ID NO: 354 - protein, 65 aa, Serratia sp. ATCC 39006_gvpJ1
MPVNKQYQDEQQQVSLCEALDRVLNKGVVIVADITISVANIDLIYLSLQALVSSVEAKNRLPGRE

SEQ ID NO: 355 - protein, 110 aa, Serratia sp. ATCC 39006_gvpJ2
MSGNKKLTHSTDSTTVADLLERLLDKGVVISGDIRIRLVEVELLTLEIRLLICSVDKAVEMGLDWWSGNPAFDSRARVSSSAPAPELEERLQRLEARLEAAPSVIEETHL

SEQ ID NO: 356 - protein, 123 aa, Stella vacuolata_ATCC-43931_gvpJ1
MSGQRMEHSVQAVGLADILERVLDKGIVIAGDISISLVEVELLTIRLRLVVASVDRAMSMGINWWQSDPNLNSHARQLEEDNRLLRERLDRLEAALALPEMAGERLADAGQGGGAEQGVTHGR

SEQ ID NO: 357 - protein, 78 aa, Stella vacuolata_ATCC-43931_gvpJ2
MSDPEPIIPRTSGDIALADLLDRALHKGLVLWGEATISVAGVDLVYLGLKVLVASTETADRMRAAAASQSADPKVRAG

SEQ ID NO: 358 - protein, 71 aa, Thiocapsa rosea strain DSM 235 Ga0242571_11_gvpJ1
MMLAIGEHPDCPEEIQRVSLCEALDRILNKGAVVSGELTIAVANVDLLYLSLQLVITSVETAKREMLYVRH

SEQ ID NO: 359 - protein, 116 aa, Thiocapsa rosea strain DSM 235 Ga0242571_11_gvpJ2
MSVQRSTLTHSTNSTSVADLLERVLDKGIVIAGDIRIKLVDIELLTIQLRLVICSVDKAREMGIDWWSDNAMFKGLSSQASAASLPGTAAASGIEDRLARLESLLVKQSAAAETVL

SEQ ID NO: 360 - protein, 121 aa, Tolypothrix sp. PCC 7601_gvpJ
MADILERVLDKGIVIAGDISVSIASTELLHIRIRLLISSVDKAKELGINWWENDPYLSSKSQRLVEENQQLQQRLESLEAQLRSLTAAKINNPELFPVNAEDNGQSDEENVPLPMNYQPND

SEQ ID NO: 361 - protein, 54 aa, Trichodesmium erythraeum IMS101_gvpJ1
MFIRVDFLLDKGVIVDAWVRLSLVVIELLTIEAKIVIASVEAYLKYSEAFCFNY

SEQ ID NO: 362 - protein, 75 aa, Trichodesmium erythraeum IMS101_gvpJ2; identical to SEQ ID NO: 155

SEQ ID NO: 363 - protein, 72 aa, Trichodesmium erythraeum IMS101_gvpJ3; identical to SEQ ID NO: 156

SEQ ID NO: 364 - protein, 103 aa, Trichodesmium erythraeum IMS101_gvpJ4
MKTSANIATSASGNGLADVLERVLDKGVVIAGDISVSIASTELLNIKIRLLISSVERAKEIGINWWESDPYFSSQNNSLVQANEKLLERVASLESEIKALRSN

SEQ ID NO: 365 - protein, 104 aa, Trichodesmium erythraeum IMS101_gvpJ5
MKTSANIAKSAGGDSLADVLERVLDKGIVIAGDISVSIASTELLNIKIRLLISSVERAKEIGINWWESDPSLSSQNNSLVQVNQKLLERVASLESEIEALKYSQ

SEQ ID NO: 366 - protein, 155 aa, Anabaena-flos-aquae_gvpK
MVCTPAENFNNSLTIASKPKNEAGLAPLLLTVLELVRQLMEAQVIRRMEEDLLSEPDLERAADSLQKLEEQILHLCEMFEVDPADLNINLGEIGTLLPSSGSYYPGQPSSRPSVLELLDRLLNTGIVVDGEIDLGIAQIDLIHAKLRLVLTSKPI

SEQ ID NO: 367 - protein, 94 aa, Bacillus-megaterium_gvpK
MQPVSQANGRIHLDPDQAEQGLAQLVMTVIELLRQIVERHAMRRVEGGTLTDEQIENLGIALMNLEEKMDELKEVFGLDAEDLNIDLGPLGSLL

SEQ ID NO: 368 - protein, 101 aa, Ancylobacter aquaticus strain UV5_gvpK
MTAPCTAETLENALRGRIDIDPEKVEQGLVKLVLMLVETVRQVVERQAIRRVEGGTLTEEETERLGLALMRLEEKMAELRLHFGLEDGDLDLKLQLPLGEL

SEQ ID NO: 369 - protein, 169 aa, Aphanizomenon flos-aquae NIES-81_gvpK
MVYSPVENSNDFLNVIPVENSNEFLNTSPKKKSNSETGLAPLLLTVLELIRQLMEAQIIRRMEEDLLSESDLERTAESLQKLEEQILNLCQIFDIDPADLNINLGDFGSLLPASGSYYPGETGNRPSILELLDRLLNTGIVVDGEIDIGVAQLDLIHAKLRLVLTSKPI

SEQ ID NO: 370 - protein, 157 aa, Aphanothece halophytica (strain PCC 7418)_gvpK
MSADESNLSQVNLNPATSNSDAGLAPLLLTVTELIRQLMEAQVIRRMDGGLLNEEELDRAGDSLQRLEAEIIRLCEIFEIDPKDLNVDLGELGTLMPKNGGYYPGESSDDPSILELLDRILHKGVVIDGNLDLGIAQLSLIQARLHLVLTSQPINGK

SEQ ID NO: 371 - protein, 105 aa, Aquabacter spiritensis strain DSM 9035_gvpK
MTGFAGGPAVTETLESVLQGRVDIDPERVEQGLVKLVLMVVETLRQVIERQAIRRVEAGALTDEEIERLGLTLLRLEEKMAELRVQFNLSEADLSLKLRLPLGEL

SEQ ID NO: 372 - protein, 119 aa, Bradyrhizobium oligotrophicum S58_gvpK
MSASSHSEAPGLRLQLGDLDTALAAVFTDAAPNGSINLDPDKIEHDLARLVLTLIEFLRRLLELQAIRRMEANELSEDEEERVGLALMRAAAQVSRLARELGVDPRELNLQLGPLGRLL

SEQ ID NO: 373 - protein, 120 aa, Burkholderia thailandensis sp. Bp5365 strain MSMB43_gvpK
MNAPHAAAVSDAAALAAALEQALAQQQAPPPRATQRFDVATASAGNGLAKLVLALMKLLHELLERQALRRIEAGSLNDDEIERLGLALMRQAEEIERLAAQFGFTDADLNLDLGPLGRLF

SEQ ID NO: 374 - protein, 114 aa, Chlorobium luteolum DSM 273_gvpK
MHEDKVQFQASSVEEALRQLEGMKQGKESRIEANPDNVESGLARLVLTLIELLRKLMEKQAMRRIDGGSLDEAQIDELGETLMKLEMKMDELKKTFNLTDSDLNLNLGPLGDLM

SEQ ID NO: 375 - protein, 156 aa, Dactylococcopsis salina PCC 8305_gvpK
MSEEESNLSRVDLNPASSNSDAGLAPLLLTVTELIRQLMEAQVIRRMDAELLTEAELDRAGESLQRLEEEILRLCEIFDVDPADLNVHLGELGTLLPKEGGYYPGETSDQPSILELLDRVLHTGVVIDGNLDLGIAQLNLIQAKLHLVLTSQPINN

SEQ ID NO: 376 - protein, 128 aa, Desulfobacterium vacuolatum_DSM 3385_gvpK
MIKDPEAKDFKIESDSIDAFARVMHADTSSCSSSSVTAGQRQQRLKIDEENIKNGLAQLVMTLIKLLHELLERQAIRRIESGSLDDDQIERLGLTLMQQCEEIDRLRKLFDLEEEDLNLDLGPLGKLL

SEQ ID NO: 377 - protein, 121 aa, Desulfomonile tiedjei DSM 6799_gvpK
MNPMNIAKVESDSLGDFAEIMQTDWISSLHSDKEEKRLNLNQDSVKNGLGQLVLTLVKLLHDLLERQAIRRMEAGTLTDTEIDRLGTTLMMQAQEIERLRSEFGLEEEDLNLDLGPLGKLL

SEQ ID NO: 378 - protein, 104 aa, Desulfotomaculum acetoxidans_DSM 771_gvpK
MYIDISEGSLKQGVLGLLLALVEIIKDALKIQALKRIEGDSLTEDEIERLGNALHELEEALVEIEMEHNLQNVVQNIREGLDNVVNEVVDTFNPERWIAENEFN

SEQ ID NO: 379 - protein, 155 aa, Dolichospermum circinale_gvpK
MLSTPADNFDESLTTVSKSKNEAGLAPLLLTVLELLRQLMEAQVIRRMEDNLLSESELERAADSIQKLEEQILHLCETFEVDPAELNINLGDFGTLLPQSGSYYPGETGSRPSVLELLDRLLNTGVVLDGEIDLGLAQLDLIHAKLRLVLTSKPI

SEQ ID NO: 380 - protein, 94 aa, Enhydrobacter aerosaccus strain ATCC 27094_gvpK
MTKLLEAKTVDPDKAGDDLVKLVLALVETLRQLVERQAIRRVDSGVLNDDEVERLGLALLRLEEKMSELKAHFGFGDEELTLKLGSLGELARDV

SEQ ID NO: 381 - protein, 146 aa, Isosphaera pallida_ATCC-43644_gvpK
MSDSLFEVRSPSAAPPSPVNPGVADEWTAVLKDWDTLTAQLRQATAPPNAENSARSHATTGRIDLDPEQVGDGLAKLVLTLLELIRQLLERQAIRRLDAGSLDHEQTERLGLTLMRLAQRMEELKTHFGLQGEDLNLDLGPLGKLL

SEQ ID NO: 382 - protein, 98 aa, Legionella drancourtii LLAP12_gvpK
MNDKREEDNALPQRINLQPDDVKNGLGKLVLILIQLIHELLERQAIGRIEAGDLSDEQIDRLGITLMKQAEEIDKLREVFGLTQEDLNLDLGPLGKLL

SEQ ID NO: 383 - protein, 157 aa, Microcystis aeruginosa NIES-843_gvpK
MTLACTPYDSDNQALLTRPESNSQAGLAPLLLTVVELVRQLLEAQIIRRMEKGVLSESDLDRAAESIQKLQEQILYLCEIFEVEPEELNVHLGEFGTLLPEAGSYYPGEEGIKPSVLELVDRLLNTGVVVEGNVDLGLAQLDLIHLKLRLVLTSQPV

SEQ ID NO: 384 - protein, 144 aa, Nostoc punctiforme ATCC 29133_gvpK
MQAISKSKGSDSGLAPLLLTVVELIRQLMEAQVIRRMDAGTLNDSELDRAAESLQKLEQQVVQLCEIFDIDPADLNINLGEMGNLLPQSGGYYPGETSSQPSILELLDRLLNTGVVVEGDLDLGLAQLSLVHAKLRLVLTSKPL

SEQ ID NO: 385 - protein, 155 aa, Nostoc sp. PCC 7120_gvpK
MVCTPVEKSPNLLPTTSKANSKAGLAPLLLTVVELIRQLMEAQVIRRMEQDCLSESELEQASESLQKLEEQVLNLCHIFEIEPADLNINLGDVGTLLPSPGSYYPGEIGNKPSVLELLDRLLNTGIVVDGEIDLGLAQLNLIHAKLRLVLTSRPL

SEQ ID NO: 386 - protein, 132 aa, Octadecabacter antarcticus 307_gvpK
MKTTSDSQFDSMKKILTDSSKEDSASCDPTDLLPNKSLPPSLSTSPETAADDLVKLVLAVIDTVRQVMEKQAIRRVESGALAEAEIERLGLTLMRLEARMVELKSHFGLSNEDLNLHFGTVQDLKDILNDEE

SEQ ID NO: 387 - protein, 132 aa, Octadecabacter arcticus 238_gvpK
MKTQNDTQFDSMKKILTDSGGGDPNPNGSPDQTQHASLPSNLSTDPETAADDLVKLVLAVIDTVRQVMERQAIRRVDSGALADEEIERLGLTLMRLEERMADLKSHFGLSNEDLNLNFGTVQDLKDILNDEE

SEQ ID NO: 388 - protein, 114 aa, Pelodictyon phaeoclathratiforme_gvpK
MDSDKILYYAGSADEIIEELEKLKPGIQGRINATPDNVESGLAKLVLTLIELIRKLIEKQAMRRIDGNSLSESQIEELGETLMKLEKKMEELKGIFNLTDKDLNLNLGPLGDLM

SEQ ID NO: 389 - protein, 156 aa, Phormidium tenue NIES-30_gvpK
MTSENAEPDLSTTLALQPPAKTDAGLAPLLLTVIELVRQLMEAQVIRRMESGDLDDNDLERAADSLRKLEEQVVSMCEIFDVDPADLNIDLGEIGTLLPKEGNYYPGQKNQNPTILELLDRLLDTGVVVEGDVDLGMAQLNLIHAKLRLVLTSKPI

SEQ ID NO: 390 - protein, 153 aa, Planktothrix agardhii str. 7805_gvpK
MSSSEPSIETIITPKSSRKDAGLAPLVLTLVELIRQLMEAQVIRRMEGNTLSEEELDRAAQSLQQLEIQVLKLCEIFEIDPTDLNIELSEFGTLLPKSGSYYPGENTQNPSILELLDRLMNTGIVVEGSVDLGLAQLNLIHAKLRLVLTSKPL

SEQ ID NO: 391 - protein, 110 aa, Psychromonas ingrahamii 37_gvpK
MPFEHFKSNNQADVNSDTKPAASVGGLNLESDDLKNGLGRLVLTLVKLLHELLERQALRRMDAGSLQDDEIERLGLAFMKQAEEIDRLRKEFGLEVEDLNLDLGPLGRLL

SEQ ID NO: 392 - protein, 112 aa, Rhodobacter capsulatus SB 1003_gvpK
MSAAMHLELGDVDAVLSQAARSLAAGGRLTLDPERVEQDLARLVLGIVELLRKLMELQAIRRMEAGSLTPEQEETLGLTLMRAEAALHEVAAKFGLQPADLILDLGPLGRSV

SEQ ID NO: 393 - protein, 110 aa, Rhodobacter sphaeroides 2.4.1_gvpK
MTYPFPPLLLRDDRLPPTEAPVTAPRIALDPDRLEHDLARILLGLMEMLRQIMELQAIRRMEAGSLSESQQEQLGTTLMRAEAAIHEMAARFGLTPADLSLDLGPLGRTI

SEQ ID NO: 394 - protein, 91 aa, Rhodococcus hoagii 103S_gvpK
MRRRIDSDPESVERGLVALVLTLVELLRQLMERQALRRVDAGDLSDDQIERIGTTLMLLEEKMEELREHFGLEPEDLNIDLGPLGPLLAED

SEQ ID NO: 395 - protein, 115 aa, Serratia sp. ATCC 39006_gvpK
MTTNQLSHHSPVFGPTSPAIQRPITEANRHKIDIDGERVRDGLAQLVLTLVKLLHELLERQAIRRMDSGSLSDEEVERLGLALMRQAEELTHLCDVFGFKDDDLNLDLGPLGRLL

SEQ ID NO: 396 - protein, 105 aa, Stella vacuolata_ATCC-43931_gvpK
MTGFLNGPADVETLETALRGRVDIDPERVEQGLVKLVLMVVETLRQVIERQAIRRVESGSLTDDEVERLGLTLMRLEEKMDQLRRQFDLGEEDLSMRLRLPLQEL

SEQ ID NO: 397 - protein, 127 aa, Thiocapsa rosea strain DSM 235 Ga0242571_11_gvpK
MSDTRTGTAPSSAASAAPDTSTLQRANLLADLLETKVAAAGRRIDIDPERVQRGLGQLVLTVVKLLHVLLERQAIRRVDGGDLDEDEIEQLGLALMRQSEEIERLRRLLGLEEQDLNLDLGPLGKLF

SEQ ID NO: 398 - protein, 160 aa, Tolypothrix sp. PCC 7601_gvpK
MAMVCTPSENSNDLLATNSKANNQAGLVPLLLTVVELIRQLMEAQVIRRMEEECLSESDLERAAESLQKLEEQVLNLCQIFEIDPADLNIHLGELGSLLPAAGSYYPGETGNTPSVLELLDRLLNTGVVVDGELDLGVAQLNLIHAKLRLVLTSKPLNTK

SEQ ID NO: 399 - protein, 153 aa, Trichodesmium erythraeum IMS101_gvpK
MSLENSPEESLIVPIDKSKSNPEAGLAPLLLTVIELLRELMQAQVIRRMDAGILSDEQLERAAEGLRQLEEQVIKLCKVFDIPTEDLNLDLGEIGTLLPKSGEYYPGEKSENPSVLELLDRILNTGVVLDGTVDLGLAELDLIHARLRLVLTA

SEQ ID NO: 400 - protein, 231 aa, Ancylobacter aquaticus strain UV5_gvpL
MLYLYAILESPPPQKPLPPGIGGAAPLFVESHALVCAASEAADAAIAREPSQIWRHQEVVAALMEGRPVLPLRFGTVVEDSAACLRLLARHHAELSAQLDRVRHCVEFALRVAGLSELADPGLDPNATPAGLGPGASHLRTLVRRERGWPVSSAAFPHDTLTAHAASRLLWARSPSQPDLRASFLVQRRSASAFLDDVNALQRLRPDLGITVTGPWPPYSFSDPDLSGGRE

SEQ ID NO: 401 - protein, 223 aa, Aphanothece halophytica (strain PCC 7418)_gvpL
MLYTYCFLFSPEKTLSLPQGFKGDLQMIEKGAIAAVVEPNLPKAELEEDDQKLVQAVVHHDWVICELFRGLTVLPLRFGTYFRGEADLRSHLAAYEESYQQKLTALTGKVEVTLKLTPIPFSEEGSSSTAKGKAYLQAKKQRYQQQSNYQTQQQEALEKLQEEIKKTYPQLIHDEPKENTERFYLLIDSHSFSVFGEKMEQWKQFLSSWSIEISDPLPPYHFL

SEQ ID NO: 402 - protein, 226 aa, Aquabacter spiritensis strain DSM 9035_gvpL
MLYLYAVLEAPPPARSLPPGIGGGAPHFIEAFELVCAASETPNRSVAPEPAEVWRHQQVVEALIDRAPALPLRFGTLVEDASACRRLLTRHRDALGAQLGRVRHCVEFALRVSGLPEEVAPDPGIGGGPGTSYLRTLARREAGWPPSTAVFPHDGLAAHAAERLLWARSTSQPDLRASFLVRKPNVAAFLADVSALQRVRPDLGITCTGPWPPYSFSDPDLSGVSP

SEQ ID NO: 403 - protein, 269 aa, Bacillus-megaterium_gvpL
MGELLYLYGLIPTKEAAAIEPFPSYKGFDGEHSLYPIAFDQVTAVVSKLDADTYSEKVIQEKMEQDMSWLQEKAFHHHETVAALYEEFTIIPLKFCTIYKGEESLQAAIEINKEKIENSLTLLQGNEEWNVKIYCDDTELKKGISETNESVKAKKQEISHLSPGRQFFEKKKIDQLIEKELELHKNKVCEEIHDKLKELSLYDSVKKNWSKDVTGAAEQMAWNSVFLLPSLQITKFVNEIEELQQRLENKGWKFEVTGPWPPYHFSSFA

SEQ ID NO: 404 - protein, 266 aa, Burkholderia thailandensis sp. Bp5365 strain MSMB43_gvpL
MNDALYLFCFARAEPLAPAWAKRAPGEPRLQLLHEGNLAAVLCDVSRSEFAGADAERRLADPAWIAGRVAVHAAAIEWTMRYSPVIPAQFGTLFSGAGRVIALMESCHAHIGRVLDHVEGKTEWAVKGWLDRQAAADSQAALLRADEPESAARTAGARYLRERQLQARAGQNLRDWLEQSVPPISARLQRHAVEMCSRPCRASDSEHEIVANWAFLVRNRDVPAFRRQAEAIDAEFATWGLHFDFSGPWPPYSFCAPLTEETTWSG

SEQ ID NO: 405 - protein, 292 aa, Chlorobium luteolum DSM 273_gvpL
MPCRLTVTWKSLRTAGLLPTAKGIQGRTERMAQNILYVYCIVRQLPGADIVARYPDLVFIEAGSAYVAAKYVSPLEYSDASMKLKLADEEWLDRNAREHLSVNVMIMAQQTIIPFNFGTIFKSRESLSGFLGDYGRKLDESFDALEGREEWAVKAYCNESFLLKNLHLESPAIAAIEQEIQAASPGKAYLLKKKKEAMSASALEGVHQGHAKAVWGELAALSKEHVLNRLIPEDVSGVDGRMIVNGVFLIANTDVGAFIRTTEDLGERYRDAGVFLDVTGPWPPYDFVDIPY

SEQ ID NO: 406 - protein, 225 aa, Dactylococcopsis salina PCC 8305_gvpL
MLYTYCLIASSPSALSLPSGFRGELQLIKQGAIAAIVEAELPLEELEENDQKLIQAVIHHDAVICEIFQQIPLLPLRFGTYFPTEKDLLEHLDFKAEKYQKKLQEIQDKVELTLKLTPLPFSTENASPMEKQGKNYLKAKKQRYQEQTNYQSQQQAELNQLQTQINQDYPQFIHGEPKENIERFYLLIKERDRSVFSEQLEQWKKDFPTWTIEVSDPLPPYHFIE

SEQ ID NO: 407 - protein, 269 aa, Desulfobacterium vacuolatum-DSM 3385_gvpL
MEKKKAVYLYCVTRANKFNAPGITGIDANTPVCFEHLENFVAVYNIIPLNTFVGTSAEENMKNIDWIGPRAMRHENVIERMMQESSVYPARFATLFSSMENLRETLHLKSGLISRFLNQTQHKCEYSLKGFINRKQLLEFLIKTKFKQEKKQLDGLSPGKKYFAQHQFNKKVETGINQWIKRRCGIFLDHLTKRNPEVSPRELFTEKTEKNNLEMMFNLAFLIHNDSKSAFLQEISQAEKEFSQTGISLVVSGPWAPYSFCKTTRGEGL

SEQ ID NO: 408 - protein, 268 aa, Desulfomonile tiedjei DSM 6799_gvpL
MSNVLYLFCLARTGLVDHIEGTGITGTEDLILKNFSGVTAVTCEVPEDDFSGESAEIKLQDLAWVGPRAVRHDRIIEEIMQYSPVFPAPFGSLFSSEKRLGTLIESNIDAIREFLDHTADKQEWSVKGLVCKSKAVDEIFTGKLKILSETLSSSPAGMRYFKERQMRSEAEKELSGKVKAACTVVGEKLLACSNNFRQRKNISFGKAEGDKQLVVNWAFLVDHSRISYFLDQVEHANSNYQAGGLAFECSGPWPPYSFCPSLHMEPTR

SEQ ID NO: 409 - protein, 259 aa, Desulfotomaculum acetoxidans-DSM 771_gvpL
MNLIDDCKAKYIYCIGENPGNWPSEVMGVEGSLVYHVVYRDIAAVVHDCAEQPYNSDDNNKVIDWVLGHQLVVDKACSCYSSVLPFTFNSIVKGKEDLSSHEILVNWLEDNYDNFKLKLGKIKGKKEYSVQLFLDKQVSLSLLQSESDILELQVELLGSAKGKAYFVQEKINKKIGELMANRADSYCRQFYHEISSVVSECKLCKLKQAGRNEIMIINLVCLAGDNEVEVLGDVLEKIKSNDIAIKIKFSGPWPAYSFV

SEQ ID NO: 410 - protein, 240 aa, Enhydrobacter aerosaccus strain ATCC 27094_gvpL
MLYVYGIADNAFEVLRGAGLLNSDVFAVPAGCLAAAASKLAQGGIETTPQGVWRHEQVLRQLMQDHAVLPLRFGTICRDRETLTDRLMEASDDLVRGLGRVRGKVEIALRIVDEREHEAHPVPSETPTVDAIGGGRGTAYLRARRRHHAAEMGREARAERVGKMLSAYIDVGAEDLVCSVAPEGDHAVSVSCLLGRDQLATLQAALERFQSDHPAIGLSWTGPWTPYSFVAPSLFGVGLP

SEQ ID NO: 411 - protein, 266 aa, Legionella drancourtii LLAP12_gvpL
MNKALYLFCLTPASDLPMMEGELLPNFSPLFIHPFQTFNAILSWVPAKEYQEQSTDSNLINTEEFMQRVFFHELVVEKIMRDEAVFPIGFGTLFSSIASLEEQILTHQTLISSCLANLNQKDEYAVRVYLNQDKALESLLSVMLQERESSWASSSPGVQYLKKQQLHNEIQRNLNQHLGGMLDEVLSMFQRHATDFKSRENTAQSSDIHGTSILHWAFLIPRVVSSIFKEQVDLMNAKYNPFGLHFVLTGPWPAYSFCTLQSVEAP

SEQ ID NO: 412 - protein, 240 aa, Lyngbya confervoides BDU141951_gvpL
MRWHRSEAVISYCDLSMIYLYALCPNSTETNNLPEGIGTAQVEVLTVGTLGAVIERDVDIAQIQKDDAQLMAAVLAHDRILSHLFTYSPLLPLRFGTQFSNSEAVTTFLKTQGETYRQKLSHLQDRAEYLVKLIPQPLDLPAIASDLKGREYFLAKKQRLQDHTAALNQQADELQTFLTDLATQDIPLVRSAPQDHEERLHVLLSRDTDTTEQVIMTWQEQLPNWQVVCSEPLPPYHFAA

SEQ ID NO: 413 - protein, 240 aa, Octadecabacter antarcticus 307_gvpL
MKRLYVYGIVGATSFDDPLPNGHDEASVFALVSGDIAVAVSFVERSAVEASAANVWLHDNVLSALMTRYAVLPMRFGTIAVGATQLLEGIVKRQKQLMKDLMRLNENVEIALHISGKNWEKVNQKVTKKNTDQAITQGTAYLLGRQQSLYGSDKTQLLVQNVRRAIRSGLDPLMKDVIWPIDKPQALPFKASCLINRNDVASFVQIVNDIAAQNLDARVTCTGPWAPYSFVGKSGVEGET

SEQ ID NO: 414 - protein, 240 aa, Octadecabacter arcticus 238_gvpL
MTKLYVYGIVGATHFDVKLPNGHDEAPVFAIVSGDLAVAVSSLERSAVEASAANVWLHENVLSALMEGHAVLPMRFGTIATGAAQLLGDIVKRRGQLMKDLTRLDGKVEIALRISGKNREKVEQRIAGQIVDTNVTQGVAYLQEKQQNLYGSFYTQSSVQCARRAIRSQLDPFIVEAIWPTDEPQMLPFRASCLIKKGDIARFVQTVDDVVVKVSDIRVTCTGPWAPYSFVGQSGSEAET

SEQ ID NO: 415 - protein, 266 aa, Pelodictyon phaeoclathratiforme_gvpL1
MVAIQERLIYIFCVTSEPPLLQQYQLQKGICVVDVDGLFVTTMDVTDNDFAENQLQSNLSDVVWLDTKVREHLDVITSIMQHVKSLIPFNFGTLYKSESSLMQFIIKYAEEFKKNLVYLEEKEEWAVKLYCNKNKIVENITHLSKKVSDINALIQNSSIGKAYILGKKKNEIIENEIINIYNTYSKKIFTKFSILSEEFRFNPIPNNETLEKEDDMILNVVLLLNKANVESFIETSDQLIIQHQNIGLNIEITGPWPCYSFINISH

SEQ ID NO: 416 - protein, 249 aa, Pelodictyon phaeoclathratiforme_gvpL2
MPLIIYAIFDSINYIDSFSSYVDAISLKSKIKLEIISTSTLSAIVSRTTDEKKQACQNDVMIYATIIGDIAAKYSILPMRYGSIVSSPFDVTELLKNHNETFVTIIKKITDKEEYSLRILYSHQDKEKNNIEDLFDLPQNVPDILHGNTDSKKYLLNKYIKHLSEEKRLQYIDKIQSIVACNLQKITDLIVYNKQTTTGFIVDAVFMIERSKKSELLDLVIQMQTLFSEHNVVLSGPWPPYNFSNINIG

SEQ ID NO: 417 - protein, 270 aa, Psychromonas ingrahamii 37_gvpL1
MKNSNHSGLDPNQALYLYCFVHADSIQSVTSQAIEKDSPVFIYQWQDIAAVLSHVPTSYFTGYDDEEPEQTIARILPRTQLHEQVIEEVMRQSPVFPAQFGTLFSSQESLEQEISQQYLAITHTLKEVSGSVEWAVKGVLDRGVAEKALYSQQLTEQQNSLSSSPGMRHLQEQRLRRETQSKLNSWLHQLYTDIATPLSELSGDFFQRKIPSSIEEGKEVILNWAFLVPESAGDDFHAQIDKLNQRLNSFGLVIQCSGPWPPYSFCNQSS

SEQ ID NO: 418 - protein, 270 aa, Psychromonas ingrahamii 37_gvpL2; identical to SEQ ID NO: 417

SEQ ID NO: 419 - protein, 262 aa, Serratia sp. ATCC 39006_gvpL
MTMNTEAQTEQAIYLYGLTLPDLAAPPILGVDNQHPINTHQCAGLNAVISPVALSDFTGEKGEDNVQNVTWLTPRICRHAQIIDSLMAQGPVYPLPFGTLFSSQNALEQEMKSRATDVFVSLRRITGCQEWALEATLDRKQAVDVLFTEGLDSGRFCLPEAIGRRHLEEQKLRRRLTTELSDWLAHALTAMQNELHPLVRDFRSRRLLDDKILHWAYLLPVEDVAAFQQQVADIVERYEAYGFSFRVTGPWAAYSFCQPDES

SEQ ID NO: 420 - protein, 226 aa, Stella vacuolata-ATCC-43931_gvpL
MLYLYAVLEALPAARTLPAGIGGGELLFVEAFELVCAASETPERAIAPEPTQVWRHQQVVEALIDCAAALPLRFGTLVEDAVACRRLLTRHREALCAQLDRVRHCVEFALRVSGLREEVGSDHVIGGGPGVSYMRALARREASWPPSTGTFPHDGLAAHAADRLLWSRSASQPDLRASFLVLKPNVAAFLADVSALQRMRPDLGITCTGPWPPYSFSDPDLSGMSP

SEQ ID NO: 421 - protein, 250 aa, Thiocapsa rosea strain DSM 235 Ga0242571-11_gvpL
MDAFYCFCFAPACLASDLRFDDCGWEDPIEIRRLAGLDVILSRVPLGRFAGAEAEQRLADLEWLVPRAQAHDRVITRTMERSTVFPLTFATLFSSLPALALEVAARRRALLDFFERMAGREEWAVKVSMDRERVIATRMQSLYPEGGDVPAGGRGYLLKQRRRGEAEQAIGPWLKGQIGCLDEALRPSCETLLIRPLRDEMVASRACLVARDLGPSLSEAIERSREAFADQGLDLHCSGPWPLYSFCGTP

SEQ ID NO: 422 - protein, 225 aa, Trichodesmium erythraeum IMS101_gvpL
MSYYVYGFLYLPESCLALPKGMEKEVELVPYQNIAAVVEANVSIEAIQETEEKLLEAILAHDRVVREIFQQVSMLPLRFGNAFALRENIINDLQNNQQQYLNILTKLQQQAEYTITFTPVSYPSTLEVSKVRGKAYLLAKKQQFEQQQAFQTKQRQQWENIRQLIFKNYPKAVFRDSTESKIKQVHLLANRDARVITTEELSTWQTECSYWQITLSEQLPPYHFV

SEQ ID NO: 423 - protein, 335 aa, Anabaena-flos-aquae_gvpN
MTTTKVNHKRAVLRLRPGQFVVTPAIERVAIRALRYLKSGFPVHLRGPAGTGKTTLAMHLANCLDRPVMLLFGDDQFKSSDLIGSESGYTHKKVLDNYIHSVVKLEDEFKQNWVDSRLTLACREGFTLVYDEFNRSRPEVNNVLLSALEEKILSLPPSSNQPEYLSVNPQFRVIFTSNPEEYAGVHSTQDALMDRLVTISMPEPDEITQTEILIQKTNIDRESANFIVRLVKSFRLATGAEKTSGLRSCLMIAKVCADNNIPVTTESLDFPDIAIDILFNRSHLSMSESTNIFLELLDKFSAEELEILNNRVTGDNDFLIDNSQFVSQQLAGQPN

SEQ ID NO: 424 - protein, 357 aa, Ancylobacter aquaticus strain UV5_gvpN
MTSEAASKDPISLLSGFGAGAASSGPKAGGRSTPSALTPRPRTGFVEAEQVRDLTRRGLGFLNAGYPLHFRGPAGTGKTTLALHVAAQLGRPVIIITGDNELGTADLVGSQRGYHYRKVVDQFIHNVTKLEETANQHWTDHRLTTACREGFTLVYDEFTRSRPETHNVLLGVFEERMLFLPAQAREECYIKVHPEFRAIFTSNPQEYAGVHASQDALADRLATIDVDYPDRAMELAVASARTGMPEASAARIIDLVRAFRASGDYQQTPTMRAGLMIARVAAQEGFEVSVDDPRFVQLCSDALESRIFSGQRAEEVAREQRRAALHALIDTHCPSAAKPRARRAGGAVRASIEGAQS

SEQ ID NO: 425 - protein, 359 aa, Aphanizomenon flos-aquae NIES-81_gvpN
MTKTNHKRAVLRVRPGQFVVTPAIEQVAIRALLYLKSGFPIHLRGPAGTGKTTLALHLAHCLDRPVMLLFGDDEFKSSDLIGSESGYTHKKLLDNYIHSVVKVEDEFKQNWVDSRLTLACREGFTLVYDEFNRSRPEVNNVLLSALEEKILSLPPSSNQPEYLSVSPQFRAIFTSNPEEYCGVHSTQDALMDRLVTINMPEPDEITQTEILIQKTNIQKESAHLIVRLVKSFRIATGAEKTSGLRSCLMIAKVCADNNLVAEPENSFFQEIAMEILSNRTHLSVNESTDIFLDVISQFSNKEIEILNDAELGSLPTMDTLANTDLGNDVPLEKEASDYVIQQKNNEFKGFQKPSTKVLN

SEQ ID NO: 426 - protein, 337 aa, Aphanothece halophytica (strain PCC 7418)_gvpN
MTTVLHARPKGFVSTPTIDRISRRAWRYLQSGFSIHLRGPAGTGKTTLAMHLADLLNRPIMLLYGDDEFKSTDLIGSNTGYTRKKVVDNYIHSVVKEEDELRQQWVDSRLTMACREGFTLVYDEFNRSPPEVNNVLLSALEEKLLVLPPDSHRSEYVRVSPNFRAIFTSNPEEYWGVHGTQDALLDRVVTINVPEPDLETQREIIVQKVGINADDGDMIVNFVRNFRDRAEMENSSGLRSCLMIAQVCHQHEIPVQTSNEDFQDICYDILTSRCPLSTQESISLLEQLFREYELELVVEDEDEDVPSVIVEGETEDLSSDEKPHLRLSHPFGNTEND

SEQ ID NO: 427 - protein, 364 aa, Aquabacter spiritensis strain DSM 9035_gvpN
MSTEPAPLVSPSQDVETTPQRPARPEPAEALAVGYRLSARPASPATLTPRPRADFVETDQVKDLTRRGLGFLRAGYPLHFRGPAGTGKTTLALHVAAQLGRPVIVITGDNELGTADLVGSQRGYHYRKVVDQFIHNVTKLEETANQRWTDHRLTTACREGYTLVYDEFTRSRPETHNVLLGVFEEKILFLPAQAREECYIRVHPDFRAIFTSNPQEYAGVHASQDALADRLATIDVDYPDRGMELAVASARTGLGETEAARIIDLVRAFRASGDYQQTPTMRASLMIARVAAQEGLRVSIDDPGFVQLCMDALESRMFSGARLEAATRETSRAALLALLAVHCPSEAPIVRVTAARRAKKADAS

SEQ ID NO: 428 - protein, 394 aa, Arthrospira platensis NIES-39_gvpN
MTTVLRAVPKGFVNTPAIERITVRALRYLQSGFSVHLRGPAGTGKTTLALHLADLLNRPIMLIFGDDELKSSDMIGNQTGYTRKKVVDNFIHSVVKLEDSLKQNWIDSRLTLACREGFTLVYDEFNRSRPEVNNVLLSALEEKLLVLPPNNSRSEYIRVNPHFRAIFTSNPEEYCGVYSTQDALLDRLITMNMPEPDEATQQEILIQKVAVTPEEAQTIVTLVQQFREATHAIAPSKIQTVARQQTNADKASGLRPSLMLARICQEHNIPIVPIDPDFQEVCRDILLSRAIGDITELESRLHQIFDHLSGLENDQIIALPPREELTTSSVPNNLSDTEQKIYTYIKDSDGARVSEIEIALGLNRVQTTDALRSLLRKSYLTQQDNRLFVVYEGD

SEQ ID NO: 429 - protein, 308 aa, Bacillus-megaterium_gvpN; identical to SEQ ID NO: 51

SEQ ID NO: 430 - protein, 351 aa, Bradyrhizobium oligotrophicum S58_gvpN
MLRSDRAAIAGGQRGSRAQGDAVARNDAAAGSRAAIAQISPRPDADNAALSPAPRTDLFENPQLASMAARALTYLNAGIPVHLRGPAGTGKTTMAMQLAARLGRPVVLLTGDDGLTAAHLVGREIGTKSRQVVDRYVHSVRRVETETSSMWCDAVLAQAVVEGLTFVYDEFTRSPPQANNPLLSVVEERILIFPAGSRKERLVHAHPEFRAILTSNPEEYAGVSRPQDALLDRLITFDLDDYDRETEIGIVSNRTGLAYAEAGVIVDLVRGVRRWPKAHHPPSMRSAIMIARIVARELITPSVDDPRFVRLCLDVLAAKAKPTDRDDRDRFAATLLRLMNNHCPAGAIDGG

SEQ ID NO: 431 - protein, 287 aa, Burkholderia thailandensis sp. Bp5365 strain MSMB43_gvpN
MEASAEFVQTPAVRNLTERALTYLGAGYGVHLAGPSGTGKTTLAFHIAAQLGRQVVLMHGDDELGSADLVGRGAGYRRSRVVDNFIHSVVKTEEEMTTTWIDNRLTTACQHGLTLIYDEFNRSRPEANNALLPVLSEGILNLPNRMTGAGYLTVHPGFRAIFTSNPEEYVGVHKTQNALMGRLITIQVGHYDRETEVEIVRARSGIARADAERIVDLTRRLRDADDNGHHPSIRAAIALARALSYCGGEATPDNAGYVWACRDILGVDLEQDARTRSQAGRRTKARR

SEQ ID NO: 432 - protein, 308 aa, Chlorobium luteolum DSM 273_gvpN
MRAAVNDNEMNTVLAPRPMANFVETEYIRDITERGLTYLKAGFPVHFRGPSGTGKTTVAMHLAGKIGRPVVVIHGDSEYKTSDLIGSEQGYKFRRLNDNFIHSVHKYEEDMSKQWVNNRLSIAIKKGFTLVYDEFTRSRPEANNILLPILQEKMLSTSASNEEDYYMKVHPEFRAIFTSNPEEYAGVNRTQDALRDRMVTMDLDYFDYETELRVTHAKSELTLEDSEKIVQVVRGLRESGKTEFDPTVRGSIMIARTLHIMQVRPEKTNDAVRKVFQDILTSETSRVGSKTNQEKVRAIVNDLIEAYL

SEQ ID NO: 433 - protein, 273 aa, Dactylococcopsis salina PCC 8305_gvpN
MTTVLHARPKGFVSTPTIDRISGRAWRYLQSGFSIHLRGPAGTGKTTLAMHLADLLNRPIMLLYGDDEFKSTDLIGSNTGYTRKKVVDNYIHSVVKEEDELRQQWVDSRLTMACREGFTLVYDEFNRSPPEVNNVLLSALEEKLLVLPPDSNRSEYVRVSPNFRAIFTSNPEEYWGVHGTQDALLDRVVTINVPEPDLETQQEIITQKVGINANDGEKIVNFVRQFRDRAAVKNSSGLRSCLMIAQVCHQHEIPVQTSDEGFRDICYDILSSR

SEQ ID NO: 434 - protein, 316 aa, Desulfobacterium vacuolatum_DSM 3385_gvpN
MSASMSSMKETRQRMSAPEQDNVVPEAGSDFVETPYVKDITDRALAYLHVGYPVHFSGPAGTGKTTLAFHVAAKLKRTVMLIHGDDEFGSSDLIGKDSGYRKAKVVDNYIHSVVKTEESMNTVWADNRLTIACQQGCTLVYDEFTRSRPEANNAFLSVLEEKILNIPSLRDIDQGYLQVHPEFRAIFTSNPEEYAGVHKTQDAMMDRLITITLDHFDRDTEVQVTMSKSDLPQKDAEKIVDIVRKLRKTGVNNHRPTIRACIAIGKILKHMGGGASKDNFVFKQICRDVLNVDTTKVTRDGEPLLPRKIDELINSL

SEQ ID NO: 435 - protein, 337 aa, Desulfomonile tiedjei DSM 6799_gvpN
MNGAELRIASIETEVITANNENIVPEAGDRFVNTPHVEELTARAMAYLEVGYSVHFSGVAGTGKTTLAFHAAAKLGRPVILVHGDHEFGSSDLIGRDAGYKKSRLVDNFIHSVVKTEEEMRSLWVDNRLTTACRDGYTLIYDEFTRSRPEANNVLLSILEEKILNLPSLRRTGEGYLEVHPSFRAIFTSNPEEYAGVHKTQDALMDRIITINVDHYDRETEIEITRAKSGVCKQDATVIVDIIRELRLLGVNNHRPTIRAAIAIARVLAHTGEHADQHNSVFQWLCKDVLSTDTVKVSRGGSPLMAKKVEEVIRKVCGRTGGKRSGKPVGSKEETSE

SEQ ID NO: 436 - protein, 307 aa, Desulfotomaculum acetoxidans_DSM 771_gvpN
MQLNGLDKNSIINPVVLSDFVVTDYISNVVDRALAYIKAGFAIHLRGRSGTGKTSIAMYISSKLNRPTLVIHGDEEFRTSDLIGGRYGYRIRKTIDNFVQSVVKVEEDLVERWVDSRLTTACKNGYTLVYDEFTRSRPEANNILLSVLQERLLDISVARGAEEGYVKVHPDFTAIFTSNPEDYAGVYGSQDALRDRMVTLDLDNYDKETEISIIKSKSKLSREDSERVVNILRDLRELGDCEYGPTIRGGIMIAKTLQVLGAPVDKNNEMFRQICEEVLASETSRAGNLQALRKVRKVINELFNKYA

SEQ ID NO: 437 - protein, 352 aa, Dolichospermum circinale_gvpN
MSITKVNHKRAVLRLRPGQFVVTPAIERVVIRALRYLRSGFPIHLRGPAGTGKTTLGMHLANCLDRPVMLLFGDDQFKSSDLIGSESGYTHKKLLDNYIHSVVKVEDEFKQNWVDSRLTLACREGFTLVYDEFNRSRPEVNNVLLSALEEKILSLPPSSNQPEYLSVNPQFRVIFTSNPEEYCGVHSTQDALMDRLVTINMPEPDEITQTEILIQKTNIGRESANLIVRLVKSFRLATGAEKTSGLRSCLMIAKICADHDIPASTEDLDFREIAIDILFNRAQLSISESTDIFMGLLEQFSAEEIKVLNDTHFPTDELLINNSQFITQELVTQPNTELATDIPQELRKTEQN

SEQ ID NO: 438 - protein, 321 aa, Enhydrobacter aerosaccus strain ATCC 27094_gvpN
MSMDQAEEIGVVTTIEPRPRADFVRTQSVEATARRALGYLNAGFSVHFRGPAGTGKTTLALHLAALLGRPMVMITGDEEMLTSTLVGTQHGYHFRRVVDRFIHTVTKTEETADKRWADHRLTTACREGYTLIYDEFTRSRPEANNVLLSVLEEGLLVLPAQNQNEPYIKVHPNFRVIFTSNPQEYAGVHDAQDALGDRIVTIDMGHADRELELAIAAARSGLPPTQVAPIVDMVREFRETGEYDQTPTLRTSIMICRMMSQERLAPTIEDQQFVQICMDILGGKSLPGGKGDNKRAQQQKMLLSLIEHHCPARSFTSVGEV

SEQ ID NO: 439 - protein, 345 aa, Isosphaera pallida_ATCC-43644_gvpN
MDYESTALQLKPRPDFVATPWVRELADRALGYLTAGYPVHFSGPAGTGKTTLAMHLAALVNRPVVLLHGDDEFGSSDLVGDHLGFRSTKVVDNFIHSVVKTEQSVSKTWVDHRLTTACRHGFTLIYDEFNRSRPEANNILLTILEERLLELPPIAGGRDGSGPLRVHPEFRAIFTSNPEEYAGVHKTQDALLDRMITISMGGHDEATETEITAAKSGLSRDEAARIVELARAVRALKPLRHPPTIRSCLMIAKVAALRKVPIDPNDALFLAICRDVLRIDALPVDDPEATFAELIRRVFAPTPAVAPPRVPTTGFAANRVVPIPRRPLAASASPPPGANGHAHLR

SEQ ID NO: 440 - protein, 335 aa, Legionella drancourtii LLAP12_gvpN
MMTQENNGSLTDSKNNDKLIRFVNNRSDNILLEASEEFTETPHIRGISERALAYLDIGYPIHLLGPAGTGKTTVALHIAAQLGRPVILIHGDDEFTGADLVGRGTGYHHSKLVDNFIHSVLKTEEEMTTMWTDNRLTTACEQGYTLIYDEFNRSRAEANNALLSVLSEGILNLPGRRERDGIGYVDVHSNFRAIFTSNSEEYVGIHKTQNALADRLIAIKMDYPDQQSEIQIIEKKSTLPRKDIEIIVNLARELRLKSEKRPSIRGCIAIARVLAYHNRHAHADDPIFQAVCQDIFGISKEFLKQLLHPMDSGLQKRSEKNQESIKKYKTKNQKL

SEQ ID NO: 441 - protein, 421 aa, Lyngbya confervoides BDU141951_gvpN
MSTVLQARPRNFVSTPAVERIARRALRYLQSGYSVHLRGPAGTGKTTLALHLADLLSRPIMLVFGDDEFKTSDLIGNQSGYTRKKVVDNYIHSVVKVEDELRHNWVDSRLTLACREGFTLVYDEFNRSRPEVNNVLLSALEEKLLVLPPSGHRPEYLRVNPHFRAIFTSNPEEYAGVHGTQDALLDRLITIHMPEPDELTQQQILIQKVGIEPADALMIVRLVKAFKSQMGNHSATSLRPSLMIANICHEHGVAMMTEDADFRDVCSDVLLSRVTNELSPATHTLWDLFNELTASADVLGPESNSTDVSPQPEADKPVETKGSKGKSTTKSKAKESAKASEEADEAGDDSASAPELDEIESSILTFLTARESASLSEIESELSLTRFKAVDALRSLVEAGYLQKQNGAGKPAIYGLVPEES

SEQ ID NO: 442 - protein, 346 aa, Microcystis aeruginosa NIES-843_gvpN
MTVTETQTRRAVLSLRPGQFVVTPSIDQIATRALRYLNSGFSIHLCGPAGTGKTTLAMHLANCLARPVMLIFGDDDFTSSDLIGSQSGYTHKKLMDNYIHSVLKVEDELKHNWVDSRLTMACREGFTLVYDEFNRSRPEVNNVLLSALEEKILTLPPTSHQPDYLQVNSQFRAIFTSNPEEYCGVHATQDALMDRLVTINMPEPDQLTQTEILAQKTGIGREDALFIVNLVKTFRVKTATEKTSGLRSCLMIAKVCASHDIAANSADSDFRDICADVLLSRTNLSVDKSRAILWEILEDNPLESLSFLEEEEPSDAQVSTSEPSTGNQSLKAIQSLLRGNLPQRKD

SEQ ID NO: 443 - protein, 390 aa, Nostoc punctiforme ATCC 29133_gvpN
MTTVLNASPQRFVNTPAVQRIAQRALRYLQSGFSIHLRGAAGVGKTTLAMHLADLLNQPIILLFGDDEFKTSDLIGNQLGYTRKKVVDNFIHSVIKVEDEVRQHWVDARLTLACKEGFTLVYDEFNRSHPEVNNVLLSVLEERLLVLPTNQHRAEYIRVHPQFRAILTSNPQEYCGVHATQDALMDRVITIDMPTPDELSQQEIVVHKTGIDSEKAEVIVRIVRTFWSRSGSGQGGGLRSCLMIAKICHEHEISVNPGDPSFQDICADILLSRTNQPLIEATRLLEEVLSEFYHRINTQSQPSEIIPNNQNQIVLEQRVPYEHEVYNYLCNSPGRRFSELAVELGIDRSQIVAALKSLREQGVLVQMQGNAESPSISQTVAFDSGHLINK

SEQ ID NO: 444 - protein, 410 aa, Nostoc sp. PCC 7120_gvpN
MTLTANNKKRAVLRVRPGQFVVTPAIEQVAIRALRYLTSGFAIHLRGPAGTGKTTLAMHLANCLDRPIMLIFGDDEFKSSDLIGSESGYTHKKLLDNYIHSVLKVEDEFKQNWVDSRLTLACREGFTLVYDEFNRSRPEVNNVLLSALEEKILTLPPSSNQPEYLHVNPQFRAIFTSNPEEYCGVHSTQDALMDRLVTINMPEPDELTQTEILAQKTALNRADALLIVRLVKAFRSRTGGEKTSGLRSCLMIAKVCAEHNILVSPQSSDFREICADVLFNRTNWSASEAATIFLELLNHLDLQQIEEFKNSIIPEDTDAIAEGGFPTIIDSHFGTLDSEVLEQPGVEDSIPFEQEIYLYLQQYKSAALALVQQEFELSRTVATNALNSLEQKGLVSKNNHVYTIEEPNQS

SEQ ID NO: 445 - protein, 342 aa, Octadecabacter antarcticus 307_gvpN
MNSNLRATNSGGPDISKTMMPEAREDFVQTESVKSISRRALAYINAGYSVHFRGPAGTGKTTMAMHTAALLGRPVVLITGDEEMITSNLVGAESGYNYRKVTDNYIHTVSKIEESSDRSWNDHRLTTACREGYTLIYDEFTRSRAEANNVLLSVLEEGILVLPAQNRGEPFIKVHPNFRVIFTSNPQEYAGVHEAQDALSDRIVTIDIGEADRELEVSIASSRSGLEVAKTEPIVDMVRAFRDTGEYDQTPTLRACIVICRMVANEKLNTTIDDPFFVQICLDVLGSKSTFGGKEHDKRTQQRKLLLDNLKHYCPSKVSTKPSAKDDESKSTLIQVSSRGSL

SEQ ID NO: 446 - protein, 324 aa, Octadecabacter arcticus 238_gvpN
MMPEARKDFVQTDSVKSVSRRALAYINAGYSVHFRGPAGTGKTTMAMHTAALLGRPVVMITGDEEMVTSNLVGAESGYNYRKVTDNYIHTVSKVEESSDRSWNDHRLTTACREGYTLIYDEFTRSRAEANNVLLSVLEEGILVLPAQNRGEPFIKVHPDFRVIFTSNPQEYAGVHDAQDALSDRIVTIDIGAADRELEVSIASSRSGLEVAKTAPIVDMVRAFRDTGEYDQTPTLRACIMICRMVANEKLNPTIDDSYFVQICLDVLGSKSMFGAKEQGKRTQQEKLLLDNLSHHCPSPPPSKPSAKEAEAKPRSIQATSRGPA

SEQ ID NO: 447 - protein, 308 aa, Pelodictyon phaeoclathratiforme_gvpN
MRRQGCDSEMNTVLEPKPMPNFVETDYIRDITSRGLTYMKAGFPVHFRGPSGTGKTTVALHLASKIGRPVVIIHGDSEYKTSDLIGSEQGYKYRRLDDNFIHSVHKYEEDMTKQWVNNRLTIAIKKGFTLVYDEFTRSRPEANNILLPILQEKMMSTSSSNEEEYYMKVHPEFRAIFTSNPEEYAGVNRTQDALRDRMVTMDLDYFDYETELMITHAKSGMSLDDAEKIVKIVRGLRESGKTEFDPTIRGSIMIAKTLNVLNARPDKTNELFKKVCQDILTSETSRVGSKTNQERVRGIVNELIDLHS

SEQ ID NO: 448 - protein, 454 aa, Phormidium tenue NIES-30_gvpN
MNTVLQARPRNFVSTPTLERTSIRALRYLQSGYSIHLKGPAGTGKTTLALHLADLLARPIMLLFGDDEFKTSDLIGNQSGYTRKKVVDNYIHSVVKVEDELRHNWTDSRLTLACREGFTMVYDEFNRSRPEVNNVLLSALEEKLLVLPPSNNRAEYIRVSPHFRAILTSNPEEYCGVHGTQDALQDRLITINMPEPDELAQQQILVQKVGIDSSAALQIVQLVKAFQSAVAPDMVSSLRPSLMIATICHDHDILPLAENADFRDVCSDILLARSKEPAPDATRHLWNLFNRFVVSQAALVNDLSLKPEAHPTARFHGEEEDDAPLQPLEALVESDIDDVAVEDQPVIGPQDLQGETLPEAVIPEPQGETVVETPAEAEALPEEIARVQVSPDDIETRIFDYLDATGTASLVNIEAALDLNRFQAVNAVKSMLDQGLIEKQETDGQLQGYQLSSN

SEQ ID NO: 449 - protein, 398 aa, Planktothrix agardhii str. 7805_gvpN
MTTVLQARPKGFVNTPTIEQLTIRALRYLQSGFSLHLRGPAGTGKTTLAMHLADLLNRPIVLIFGDDELKSSDLIGNQLGYTRKKVVDNFIHSVVKLEDELRQNWIDSRLTLACKEGFTLVYDEFNRSRPEVNNVLLSALEEKLLVLPPNNSRSEYIRVNPHFRAIFTSNPEEYCGVYGTQDALLDRLITIDMPEPDDETQQEILIQKIGISPEDAKNIIEIVKIYLEITTQKKEIKPVQNGKAARPHIDKASGLRPGLIIAKICHEHDISIQENNQDFIKVCADILLSRTNLSLTEAQNKLEKVIKTVLTDGDTSNNSFLPPSETQLTENNSLEIEEQVYQYLQKTTSARVSEIEVALGLNRVQTTNVLRSLLKQGHLKQQDNRFFAVNKQGELIQP

SEQ ID NO: 450 - protein, 398 aa, Planktothrix rubescens_gvpN
MTTVLQARPKGFVNTPTIEQLTIRALRYLQSGFSLHLRGPAGTGKTTLAMHLADLLNRPIVLIFGDDELKSSDLIGNQLGYTRKKVIDNFIHSVVKLEDELRQNWIDSRLTLACKEGFTLVYDEFNRSRPEVNNVLLSALEEKLLVLPPNNSRSEYIRVNPHFRAIFTSNPEEYCGVYGTQDALLDRLITIDMPEPDDETQQEILIQKIGISPEDAKNIIEIVKIYLEITTQKKEIKPVQNGKAARPHIDKASGLRPGLIIAKICHEHDISIQENNQDFIKVCADILLSRTNLSLTEAQNKLEKVIKTVLTDGDTSTNSFLPLSETQLTENNSLEIEEQVYQYLQKTTSARVSEIEVALGLNRVQTTNVLRSLLKQGHLKQQDNRFFAVNKQGELIQP

SEQ ID NO: 451 - protein, 334 aa, Psychromonas ingrahamii 37_gvpN1
MSIENLNNVSEIKIEQSDDDHIYPEASEDFVETPYIKEVTERAMLYLDAGYPVHFAGPAGTGKTTLAFHIAALRQRPVTLIHGNHEFGTSDLIGKESGYRRHRVVDNYVHSVVKEEEELQSLWSDNRLTTCCRNGDTLVYDEFNRSTPEANNVLLSILEEGILNLPSSRSDGYLEVHPQFRAIFTSNPQEYAGTHATQDALVDRMITIMLHYPDRHTEVRVAIAKSGINSDEAGSIVDIVNEFRELCGSKIVSSGPKTMPTVRASIAIARVLVQKGEHAFRDNTFFHRICRDVLCMYTQQVSFSNRSVLDKQLEDLIMKFCPATYKSSGSKIRA

SEQ ID NO: 452 - protein, 335 aa, Psychromonas ingrahamii 37_gvpN2
MSINNLNISTIKIEQPENDNIYPEASAEFVQTPYIQEVTERALLYLDAGYPVHFAGPAGTGKTTLAFHIAALRKRPVTLIHGNHEFGSSDLIGKESGYRRHRLVDNYVHSVMKEEEELKSLWVDNRLTTCCRNGDTLVYDEFNRSTPEANNVLLSILEEGILNLPSLRSMGDGYLEVHPSFRAIFTSNPQEYAGTHATQDALVDRMITIMLNYPDRDTEVRVAVAKSGISNEEAGFIVDIVNEFRELSNHKSLSSGQKSMPTVRASIAISRVLIQKGEHAFRDNVFFHRVCHDVLCMYIQKISPSNRSFLDKQLEVLIGKFCPAAKSALVPKVVK

SEQ ID NO: 453 - protein, 305 aa, Rhodobacter capsulatus SB 1003_gvpN
MTIPRDLPWGDARTPLFEDEELRSLLDRAEIYLREGIAIHFRGPAGVGKTTLALHLAQRFARPVTFFVGNDWLGRADIFGRDLGETVSTVQDHYISSVRRAERKSRIDWQEAPLARAMRDGHVLVYDEFSRSRPEANAALLSVIEEGVLPLSDPAAGRSHIVAHPDFRVILTSNPRDYVGVQAVPDALLDRMITFSLDGMSFETEVGIVATAARTDPADARAICALIHLLRAEKPGTMEISMRSGIMIARLARAAGVAPDPADPVFVQICADVLGTRMRGSDIDDVMALLLRPDPAPAACAGGAR

SEQ ID NO: 454 - protein, 316 aa, Rhodobacter sphaeroides 2.4.1_gvpN
MTVLSPSLPHAAGIDAALVENPWLGLRRSGRYFQNAETEALFARALGYARAGVCVHLAGPAGLGKTTLALRIAQALGRPVAFMTGNEWLGSRDFIGGEIGQTVTSVVDRYIQSVRRTEQSARIDWKESILGQAMRCGQTFIYDEFTRASPEANAALLSVLEEGVLVSTDGASRHQYIEAHPDFRVLLTSNPHEYQGVKAAPDALIDRMVTLRLEEPSAPTLAGIVALRSGLDPATARRIVDLILSVQRSGEMQAPPSMRTAILVARLAAPLRLAGRLSDAALAEIAADVLRGRGLEADAAAFEAKLAAPTPGETAR

SEQ ID NO: 455 - protein, 329 aa, Serratia sp. ATCC 39006_gvpN
MIKQNTVSQYTVDDDLVVPEASEHFVATSYVNDIIERALVYLRAGYPVHFAGPSGIGKTTLAFHLAALWGRPVTMLQGNEEFVSSDLTGKDIGYRKSSLVDNYIHSVLKTEEQMNRMWVDNRLTTACRNGDMLIYDEFNRSKAETNNVLLSVLSEGILNLPGLRGVGEGYLDVHPEFRAIFTSNPEEYAGTHKTQDALMDRMITINIGLVDRDTELQILHARSELELKEAAYIVDIIRELRGNEHETKHGLRAGIAIAHILHQQGIKPRYGDKLFHAICYDVLSMDAAKIQHAGRSIYREMVDGVIRKICPPIGSDTVKASTQKIKAVE

SEQ ID NO: 456 - protein, 364 aa, Stella vacuolata_ATCC-43931_gvpN
MSTEPAPVMPPSTDIEFGSQRPARPKPAEALAVGYRLSARPAAPSTLTLRPRADFVETDQVKDLTRRGLGFLRAGYPLHFRGPAGTGKTTLALHVAAQLGRPVIVITGDNELGTADLVGSQRGYHYRKVVDQFIHNVTKLEETANQRWTDHRLTTACREGYTLVYDEFTRSRPETHNVLLGVFEEKILFLPAEAREECYIRVHPDFRAIFTSNPQEYAGVHASQDALADRLATIDVDYPNRAMELAVASARTGLAEAEAARIIDLVRAFRASGDYQQTPTMRASLMIARVAAQEGLRISVDDPGFVQLCMDALESRIFSGARQEADARARHRVALLGLLATHCPSEAPVARVATVARAKRKSAS

SEQ ID NO: 457 - protein, 332 aa, Thiocapsa rosea strain DSM 235 Ga0242571_11_gvpN
MSAKPLQDASEVSALNNDNVQPEASDTFVCTPSVEALAERASAYLQAGYPVHLAGPAGTGKTTLAFHAAAKRGRPVKLIHGNDELGLADMVGQDNGYRRNTLVDNYIHSVVKTQEEVRTFWIDNRVTTACLNGETLIYDEFNRSRPEVNNIFLSILGEGILNLPNRRHQGAGYLEVHPEFRVIFTSNPEEYAGTHKTQDALMDRMITMKIGHYDRETEIRVTRAKSGLPPSEVAIVVDIVRELRGQSVNHHRPTLRACIAIARIMADRRISARSNNSFFRDICRDILDMDSAKVRRDGNALGESPVDDVVASISARARRPKIVEPKGLHKEI

SEQ ID NO: 458 - protein, 348 aa, Tolypothrix sp. PCC 7601_gvpN
MTNTENHKKRAVLRVRPGQFVVTPAIEKVAIRALRYLTSGFAIHLRGPAGTGKTTLAMHLANCLDRPIMLIFGDDEFKSSDLIGSESGYTHKKLLDNYIHNVLKVEDELKQNWVDSRLTLACREGLTLVYDEFNRSRPEVNNVLLSALEEKILTLPPSSNQPEYLHVHPKFRAIFTSNPEEYCGVHSTQDALMDRLVTINMPEPDEQTQIEILTHKTGIHHEYAQLIARLVKAFRSATGAEKTSGLRSCLMVAKVCAEHDILVTPENTDFREICADVLFNRTNLSASDATTLFLELLNHVQVKPVEPVDDSDPYDVAEAEIVGAAEPQTDAIAEPVTLDESLLSDQPN

SEQ ID NO: 459 - protein, 311 aa, Trichodesmium erythraeum IMS101_gvpN1
MTTVLNVSPDRFVSTPGVERVTQRASRYLESGYSVHLRGPAGVGKTTLALHLAHLRQQPIFLMIGDDEFKTSDLIGNKSGYTRKKLVDNYIHTVLKVEDELRDNWIDSRLTLACKEGFTLIYDEFNRSRPEVNNVLLSVLEEKMLVLPPSQNQSEYIQVHPQFRVILTSNSEEWTGVHATQDALLDRVVTIGMEQPDISTEQNIVIQKTGINPLKAEVIIKLVRSVRQRVDKEDLGSLRSALMISKVCHDHDIPLDGKDSSFSDLCADILISRPNLPRQEALQQLDEVLEEFFPADQPSSSDVGLEKEGSL

SEQ ID NO: 460 - protein, 311 aa, Trichodesmium erythraeum IMS101_gvpN2
MTTVLNVSPDRFVSTPSVERVTQRASRYLESGYSVHLRGPAGVGKTTLALHLAHLRQQPIFLMIGDDEFKTSDLIGNKSGYTRKKLVDNYIHTVLKVEDELKHNWIDSRLTLACKEGFTLIYDEFNRSRPEVNNVLLSVLEEKMLVLPPSQNQSEYIQVHPQFRVILTSNSEEWTGVHATQDALLDRVVTIGMGQPDISTEQNIIIQKTGINPLKAEVIIKLVRSVRERLETEDLGSLRSALMISKVCHDHDIPLGGKDSNFSDLCADILISRANLPRQEALKQLDEVLEELFPADQLSISDIGLKKEGSL

SEQ ID NO: 461 - protein, 114 aa, Anabaena-flos-aquae_gvpV
MIKNIQVFFMKTISNRSISRAKISTMPRPKSDASSQLDLYKMVTEKQRIQRDMYSIKERMGLLQQRLDILNQQIEATEKTIHKLRQPHSNTAQNIVRSNIFVESNNYQTFEVEY

SEQ ID NO: 462 - protein, 105 aa, Aphanizomenon flos-aquae NIES-81_gvpV
MKSFRHRSIIRAKISTMPRHISEASSQLELYKMVAEKQRISRELSSIKERMATLQKRLDSLNNEIDNTEKTIHKLRQPHSSTAQNIVRSKNVVESNNYQTFEIEY

SEQ ID NO: 463 - protein, 112 aa, Arthrospira platensis NIES-39_gvpV
MRYKYHRQIQPKLSAIPRQKSQANLYRNSYLLAVEKKRLTEELEVLQSRSHIIEQRLALIEDQLGELEKDVTQLSVPPSPKPQNNLPVNNPEPPPQSNPTNSSHINTFMVDY

SEQ ID NO: 464 - protein, 91 aa, Burkholderia thailandensis sp. Bp5365 strain MSMB43_gvpV
MPIPKKGLHDIRFRHAPGATPLPVHSMYMRISCIEMEKSRRTIERRAAQRRIAAVDSRVADLEREKARLYAAIDNEAPQAGDIRGSFRIRY

SEQ ID NO: 465 - protein, 103 aa, Desulfobacterium vacuolatum_DSM 3385_gvpV
MLKNRNRSIKGVQNIKTHAGKVDHVSHPHMAYMRISCLEMEKARKNKEKSGAQKRIDMINQRLMEIEKEKAHIQRILGDTSIALESSNVDHDSEIKGGFKIKY

SEQ ID NO: 466 - protein, 106 aa, Desulfomonile tiedjei DSM 6799_gvpV
MNIRMKGNSRGLRDIRTHSGKVDRVGLPYMAYMSISCLEMEKARREKERLSALTRIKNIEQRIREIEAEKDLLLKGVGERTRTDLQKASTPRDQSAQCKGGFKIRY

SEQ ID NO: 467 - protein, 105 aa, Legionella drancourtii LLAP12_gvpV
MMPALVKGLRNIKTMSNRLDKVQSPHEAFISAAALHREKQRHLQELAILRNRLDEINLRLEQINEQQNQVAEAFDISPPRAVKSALRTGIQSKTGSTSHGFKIKY

SEQ ID NO: 468 - protein, 110 aa, Microcystis aeruginosa NIES-843_gvpV
MTTTRPPRPIRSKISTMPRKQSEADHQLELYKLITEKQRIQEKLEMMERQIQQLKNRLTFVTEQIETTEQSIQNLRTANPPSVAKKPDSPKTVAHSSNNSSNFQTFYLEY

SEQ ID NO: 469 - protein, 94 aa, Nostoc punctiforme ATCC 29133_gvpV
MHRTPNRRQIQAKLSTMPPQRSQATVYLNAYKMMLEKERLEEELEKLEARRHQIQQRLAILNSQTIPEENMTHQQANTDLENNTPKFNTLTLEY

SEQ ID NO: 470 - protein, 113 aa, Nostoc sp. PCC 7120_gvpV
MLSIIQVFPMTKVRNRGIIRPKITTMPRNKSEASSQLELYKLVTEQQRIKQELAFIEQRTVLLKQRLSTLKTQIEGTERSINHLRHSELKYSRIALPKIFSETNNYQAFDIEY

SEQ ID NO: 471 - protein, 108 aa, Planktothrix agardhii str. 7805_gvpV
MRPFRSQPPILPKISTMPRQKTEATLYRSLYQLAVEKKRLQEELESLGQRFETVTQRLQQIETQIQGLETDVKQIAPPKPPETKPNQPSTPTPTKAEPGSVSTFTLDY

SEQ ID NO: 472 - protein, 103 aa, Psychromonas ingrahamii 37_gvpV1
MTAAKRKTLRGLADIRTISSCGTSGQEAYQMYLKRGVLEMEKLRRQKEKNSALERVTNINRRLMAIDTDIDFLCQSLKVIEKRTNQENSIVEKSVSRGFKLRY

SEQ ID NO: 473 - protein, 106 aa, Psychromonas ingrahamii 37_gvpV2
MIFSKKKNALRGLADIRTLSGCGTSGQEAYQMYLKRGVLEMEKLRRQKEKNSALERVRNINYRLMAIDADIDFLCQSLKVIEERTNKENSISNESVTYKKGFKLRY

SEQ ID NO: 474 - protein, 105 aa, Serratia sp. ATCC 39006_gvpV
MAISTRPLRTLSDIKTHSGRVSGEHQTYRDYFQIGALELERWRRTREREAASSRIASIDERIADIDKEKAALLADATAASAVAENNDKSEAAEKKKKSSGLRIKY

SEQ ID NO: 475 - protein, 130 aa, Thiocapsa rosea strain DSM 235 Ga0242571_11_gvpV
MSKFTQPSRSVRDIKTLAGMADDVRAPHKMYMRLFALETERHRRLQERASAMLRVDNIDARCAEIAEEMEQLLQILGVEAVAPGGPPANARPGSGRVPTQPHRGRGKGTGAGRQTTSGETSVGEAVKIRY

SEQ ID NO: 476 - protein, 226 aa, Anabaena-flos-aquae_gvpW
MELENLYTYAFLEIPSSPLILPQGAANQVVLINGTELAAIVEPGIFLESFQNNDEKIIQMALSHDRVICELFQQITVLPLRFGTYFTSTNNLLNHLKSHEKEYQNKLEKINGKNEFTLKLIPRMIEEIVPSEGGGKDYFLAKKQRYQNQNNFSIAQAAEKQNLIDLITKVNQLPVVVQEQEEQIQIYLLVSCQDKTLLLEQFLTWQKACPRWDLLLGDCLPPYHFI

SEQ ID NO: 477 - protein, 226 aa, Aphanizomenon flos-aquae NIES-81_gvpW
MELENLYTYAFLKTPSFSLHLPQGSTTSVIQIDGNGLSAIVEPGISLDSFQDDDEKIVQMAIEHDRVICDIFRQITVLPLRFGTYFANTDNLLTHLESYGQEYLDKLEKINCKTEFILKLIPRMITEESPVLESGRHYFLAKKQHYQRQKNFILAQASEKEILINFISKINQIPVIIQEQEEEVRIYLLVNYQDKTLLLEQFLTWQQTCPRWDLFLGEGIPPYHFI

SEQ ID NO: 478 - protein, 227 aa, Arthrospira platensis NIES-39_gvpW
MYVYAFIKSQSISWKSVQGIYEPVVLLEAGALAAVVEPNLQAENLSADNEEELMRAVLTHDRIVCQIFEETTVLPVRFGTCFDSEARLCEHLTTEGDRYFRQLEKLTGRAEYLLEAIPQPFNQEKPSSDTTAPPTKGRDYFLQKKRLHQQRLNFEQQQEQQWQDFINAIASKYPIVQGKATEDAERIYLLIPRSQEVALVEWVAQQQQNIDLWEFSLGNAVPAYHFL

SEQ ID NO: 479 - protein, 226 aa, Dolichospermum circinale_gvpW
MKLENFYTYAFLEIPRFPLVLPQGAASQVILINGSGMSAIVEPGISLESFQNNDEKIIQMALSHDRVICELFQQVTVLPLRFGTCFTSTNNLLNYLELHRQEYQEKLEKINGKIEFTLKLIPQTMEEPAPLERGGRDYFLAKKQRYQDQNNFRIAQAAEKQNLIDSISKVNQLPFVIQEKEEEVNIYLLVKSEDKTLLLEQFLNWQKACPRWDLLLGEPLPPYHFI

SEQ ID NO: 480 - protein, 227 aa, Microcystis aeruginosa NIES-843_gvpW
MKLYNLYTYAFLKTPIESLKLPVGMANPLLLITGGELSAVVEPEVGLDTLQNDDERLIQSVLCHDRVICQLFQQTTILPLRFGTSFLEAENLLTHLCSHGQEYQEKIEELEGKGEYLLKCIPRKPEEPVLFSESKGRQYFLAKKQLYEAQQDFYTLQGSEWQNLVNLITQSYPSTRIITAPGTESRIYLLVNLQEEPLLIEQVLHWQKACPRWELQLGQVSPPYHFT

SEQ ID NO: 481 - protein, 229 aa, Nostoc punctiforme ATCC 29133_gvpW
MSIYAYALLVPTASPLVLPLGMERNTELVYSSGLAALVEPEISLEAIQATDERLLQAVLNHDHVIRELFQQTPLLPLRFGRGFTSVEKLLNHLENHQEQYLETLTQLADKVEYSVKVTACSLLDDSDTIDARGKAYLLAKKQRYQTQQAFQAQQCEQWELLNELILKTYTNVICETRQSDVRQIHFLAQRNDSTLSTQLFSLWQVQCSHWQLALSEPLPPYHFLKNTLI

SEQ ID NO: 482 - protein, 227 aa, Nostoc sp. PCC 7120_gvpW
MRSPNFYTYAFLNTPDIPLRLPSGNLGQLLLIHGHKLSAVVEPGISLESSQNNDEEVIKMVLAHDRVICELSQQTTVLPLRFGTYFNSEETLLNHIESHAQEYQKKLDHIQGKTEYTLKLIPRKFEELAKVSGGNGRDYFLAKKLHYEHQKNFIGDQNREKNHLINLIMDVYRSSAIIQDYVEEVRLHLLVDRHDKTLLFKQVLTLQEKCPHWNLILGEPLPPYHFV

SEQ ID NO: 483 - protein, 88 aa, Bacillus-megaterium_gvpR
MEIKKIMQAVNDFFGEHVAPPHKITSVEATEDEGWRVIVEVIEEREYMKKYAKDEMLGTYECFVNKEKEVISFKRLDVRYRSAIGIEA

SEQ ID NO: 484 - protein, 95 aa, Bacillus-megaterium_gvpS
MSLKQSMENKDIALIDILDVILDKGVAIKGDLIISIAGVDLVYLDLRVLISSVETLVQAKEGNHKPITSEQFDKQKEELMDATGQPSKWTNPLGS

SEQ ID NO: 485 - protein, 65 aa, Rhodococcus hoagii 103S_gvpS
MSATPDRRIALVDLLDRVLGGGVVVAGEITLSIADVDMVHISLRTLVSSVSALTRPPDEKPENDG

SEQ ID NO: 486 - protein, 292 aa, Bacillus-megaterium_gvpT
MATETKLDNTQAENKENKNAENGSKEKNGSKASKTTSSGPIKRAVAGGIIGATIGYVSTPENRKSLLDRIDTDELKSKASDLGTKVKEKSKSSVASLKTSAGSLFKKDKDKSKDDEENVNSSSSETEDDNVQEYDELKEENQTLQDRLSQLEEKMNMLVELSLNKNQDEEAEDTDSDEEENDENDENDENEQDDENEEETSKPRKKDKKEAEEEESESDEDSEEEEEDSRSNKKNKKVKTEEEDEDESEEEKKEAKPKKSTAKKSKNTKAKKNTDEEDDEATSLSSEDDTTA

SEQ ID NO: 487 - protein, 138 aa, Bacillus-megaterium_gvpU
MSTGPSFSTKDNTLEYFVKASNKHGFSLDISLNVNGAVISGTMISAKEYFDYLSETFEEGSEVAQALSEQFSLASEASESNGEAEAHFIHLKNTKIYCGDSKSTPSKGKIFWRGKIAEVDGFFLGKISDAKSTSKKSS

SEQ ID NO: 488 - protein, 193 aa, Anabaena flos-aquae; identical to SEQ ID NO: 96

SEQ ID NO: 489 - protein, 382 aa, Halobacterium salinarum; identical to SEQ ID NO: 97

SEQ ID NO: 490 - protein, 381 aa, Halobacterium mediterranei; identical to SEQ ID NO: 98

SEQ ID NO: 491 - protein, 162 aa, Microchaete diplosiphon; identical to SEQ ID NO: 99

SEQ ID NO: 492 - protein, 129 aa, Nostoc sp.; identical to SEQ ID NO: 100

SEQ ID NO: 493 - protein, 88 aa, B. megaterium; identical to SEQ ID NO: 181

SEQ ID NO: 494 - protein, 88 aa, B. megaterium; identical to SEQ ID NO: 483

SEQ ID NO: 495 - protein, 308 aa, B. megaterium; identical to SEQ ID NO: 51

SEQ ID NO: 496 - protein, 255 aa, B. megaterium; identical to SEQ ID NO: 52

SEQ ID NO: 497 - protein, 88 aa, B. megaterium
MLHKLVTAPINLVVKIGEKVQEEADKQLYDLPTIQQKLIQLQMMFELGEIPEEAFQEKEDELLMRYEIAKRREIEQWEELTQKRNEES

SEQ ID NO: 498 - protein, 269 aa, B. megaterium; identical to SEQ ID NO: 403

SEQ ID NO: 499 - protein, 95 aa, B. megaterium; identical to SEQ ID NO: 484

SEQ ID NO: 500 - protein, 94 aa, B. megaterium; identical to SEQ ID NO: 367

SEQ ID NO: 501 - protein, 100 aa, B. megaterium; identical to SEQ ID NO: 304

SEQ ID NO: 502 - protein, 292 aa, B. megaterium; identical to SEQ ID NO: 486

SEQ ID NO: 503 - protein, 138 aa, B. megaterium; identical to SEQ ID NO: 487

SEQ ID NO: 504 - protein, 72 aa, Serratia sp.; identical to SEQ ID NO: 192

SEQ ID NO: 505 - protein, 65 aa, Serratia sp.; identical to SEQ ID NO: 354

SEQ ID NO: 506 - protein, 65 aa, Serratia sp.; identical to SEQ ID NO: 354

SEQ ID NO: 507 - protein, 164 aa, Serratia sp.
MGCLTDGMAQLRKNIDDSHESRIAQQNARVSSVSAQIAGFSTTRARNAAQDARARATFVADNVRGVNRMLSDFCHTREVMSRQQSEERATFVTDMSKKTLALLDGFNAERKSMAERCAKERADFIANVANDVAAFLSASEKDRMAAHAVFFGMTLAKKKTSLAV

SEQ ID NO: 508 - protein, 329 aa, Serratia sp.; identical to SEQ ID NO: 455

SEQ ID NO: 509 - protein, 105 aa, Serratia sp.; identical to SEQ ID NO: 474

SEQ ID NO: 510 - protein, 273 aa, Serratia sp.; identical to SEQ ID NO: 237

SEQ ID NO: 511 - protein, 262 aa, Serratia sp.; identical to SEQ ID NO: 419

SEQ ID NO: 512 - protein, 222 aa, Serratia sp.; identical to SEQ ID NO: 265

SEQ ID NO: 513 - protein, 138 aa, Serratia sp.; identical to SEQ ID NO: 298

SEQ ID NO: 514 - protein, 637 aa, Serratia sp.
MKPAIYPKFLLESPLKLVFFGGKGGVGKSTCATSTALRLAQEQPQHHFLLVSTDPAHSLQNILSDLVLPKNLDVRELNAAASLHEFKSQHEGVLKEIAYRGTVLDQNDVQGLMDTALPGMDELAAYLEIAEWIQKDTYYRIIIDTAPTGHTLRLLEMPDLIYRWLTALDTLLAKQRYIRKRFAGDNRLDHLDHFLLDMNDSLKAMHELVTDSTRCCFVLVMLAEAMSVEESIDLAGALNQQRVFLSDLVVNRLFPENDCPTCCVERNRQMLALQNGYQRLPGHVFWTLPLLAIEPRGALLHEFWSGVRLLDENEVMATTCHHQLPLRVESSISLPASTFRLLIFAGKGGVGKTTLACATALRLNSEYPELRILLFSADPAHSLSDCLGVTLQQQPISVLVNIDAQEINAQADFDKIRQGYRAELEAFLLDTLPNLDITFDREVLEHLLDLAPPGLDEIMALTAIMDHLDSGRYDMVIVDGAPSGHLLRLLELPELIRDWLKQFFSLLLKYRKVMRFPHLSERLVQLSRELKNLRALLQDTKQTGLYAVTVPTHLALEKTYEMTCALQRLGLTANALFINQITPPSDCTLCQAITSRESLELKCADEMFPSQPHAQIFRQTEPTGLSKLKTLGSALFL

SEQ ID NO: 515 - protein, 115 aa, Serratia sp.; identical to SEQ ID NO: 395

SEQ ID NO: 516 - protein, 87 aa, Serratia sp.
MVNTTNDINAATRGLLLRMGNAWFEQDELRQAVDIYLKIIEQYPDSKESKTAQTALLTISQRYERDGLFRLSLDILERVGEITPTSI

SEQ ID NO: 517 - protein, 192 aa, Serratia sp.
MRALIHFPIIHSPKDLGTLSEAASHLRTETQTRAYLAAVEGFWTMITTTIEGLDLDYTHLKLYQDGLPVCGKENEIVTDVANAGSQNYKLLLTLQHKGAILMGTESPELLLQERDLMTQLLQSTEQTEASLETAKTLLNRRDDYIAQRIDETLQDGEMAILFLGLMHNIEAKLPADIVFIQPLGKPPGGESI

SEQ ID NO: 518 - protein, 160 aa, Serratia sp.
MTGNVEGILRGLGDLVEKLVETGEQIKRSGAFDIDTNDGKNAKAVYGFSIKMGLDGNQENRVEPFGNIRRDEQTGEATVQEVSEPLVDVIEESDHVLVLAEMPGVADEDVQVELNGDILTLHSERGSKKYHKEIVLPCSFDDKAMERSCRNGILEVKLGK

SEQ ID NO: 519 - protein, 720 aa, Serratia sp.
MSEELKLKVAEALPKDAGRGYARLDPADMARLNLAVGDIVQLTSKKGTGIAKLMPTYPDMRNKGIVQLDGLTRRNTSLSLDEKVQIEPASCKHATQIVLIPTTITPNQRDLDYIGSLLDGLPVQKGDLLRAHLFGSRSADFKVESTIPDGAVLIDPTTTLVIGKSNAVGNSSHSTQRLSYEDVGGLKNQVRRIREMIELPLRYPEVFERLGIDAPKGVLLSGPPGCGKTLIARIIAQETDAQFFTISGPEIVHKFYGESEAHLRKIFEEAGRKGPSIIFLDEIDSIAPHRDKVVGDVEKRIVAQLLALMDGLKNRGKVIVIAATNLPNAIDPALRRPGRFDREISIPIPDREGRREIIEIHSTGMPLNADVDLNVLADITHGFVGADLEALCREAAMSALRRLLPEIDFSSAELPYDRLAELTVMMDDFRAALCEVSPSAIRELFVDIPDVRWEDVGGLDDVRRRLIESVEWPIKYPELYEQAGVKPPKGLLLAGPPGVGKTLIAKAVANESGVNVISVKGPALMSRYVGDSEKGVRELFLKARQAAPCIIFLDEVDSVIPARNEGAIDSHVAERVLSQFLSEMDGLEELKGVFVMGATNRADLIDPAMLRPGRFDEIIELGLPDEDARRQILAVHLRNKPLGDNIHADDLAERCDGASGAELAAVCNRAALAALRRAIQQSEEAVLSPSTVGETPVALTVRIEQHDFAEVIAEMFGDDA

SEQ ID NO: 520 - protein, 71 aa, Anabaena flos-aquae; identical to SEQ ID NO: 131

SEQ ID NO: 521 - protein, 193 aa, Anabaena flos-aquae; identical to SEQ ID NO: 96

SEQ ID NO: 522 - protein, 335 aa, Anabaena flos-aquae; identical to SEQ ID NO: 423

SEQ ID NO: 523 - protein, 248 aa, Anabaena flos-aquae; identical to SEQ ID NO: 303

SEQ ID NO: 524 - protein, 155 aa, Anabaena flos-aquae; identical to SEQ ID NO: 366

SEQ ID NO: 525 - protein, 245 aa, Anabaena flos-aquae; identical to SEQ ID NO: 203

SEQ ID NO: 526 - protein, 119 aa, Anabaena flos-aquae; identical to SEQ ID NO: 269

SEQ ID NO: 527 - protein, 114 aa, Anabaena flos-aquae; identical to SEQ ID NO: 461

SEQ ID NO: 528 - protein, 226 aa, Anabaena flos-aquae
MELENLYTYAFLEIPSSPLILPQGAANQVVLINGTELAAIVEPGIFLESFQNNDEKIIQMALSHDRVICELFQQITVLPLRFGTYFTSTNNLLNHLKSHEKEYQNKLEKINGKNEFTLKLIPRMIEEIVPSEGGGKDYFLAKKQRYQNQNNFSIAQAAEKQNLIDLITKVNQLPVVVQEQEEQIQIYLLVSCQDKTLLLEQFLTWQKACPKWDLLLGDCLPPYHFI

SEQ ID NO: 529 - protein, 60 aa, Artificial Sequence
  synthetic polypeptide
MPVNKQYQDEQQQVSLCEALDRVLNKGVVIVADITISVANIDLIYLSLQALVSSVEAKNR

SEQ ID NO: 530 - protein, 61 aa, Artificial Sequence
  synthetic polypeptide
MSGNKKLTHSTDSTTVADLLERLLDKGVVISGDIRIRLVEVELLTLEIRLLICSVDKAVEM

SEQ ID NO: 531 - protein, 72 aa, Artificial Sequence
  synthetic polypeptide
MTVVPAQQTGGGGSSGLYDVLELVLDRGLVIDAFVRVSLVGIEILKIDVRVVVASVDTYLRFAEACNRLDLE

SEQ ID NO: 532 - protein, 72 aa, Artificial Sequence
  synthetic polypeptide
MITYDDEVVCAPRAGTLYDVLELILDRGMVIDVFVRVSLVGIEILKVDARIVVASVDTYLRFAEACNRLDLE

SEQ ID NO: 533 - protein, 72 aa, Artificial Sequence
  synthetic polypeptide
MTVSSQSMNRAPKPSSLADVLDVVLDRGIVIDAYARVALVGIEVLTADARVVIATVDTYLRFAEAVNRLDLA

SEQ ID NO: 534 - protein, 61 aa, Artificial Sequence
  synthetic polypeptide
MTINKSNDCSSLAEVVDRILDKGVVIDVFARISVIGIELITIEARIVIASVDTWLRYAEAV

SEQ ID NO: 535 - protein, 60 aa, Artificial Sequence
  synthetic polypeptide
MVSQSPDSSSLAEVLDRILDKGIVVDTWARVSLVGIEILAIEARVVVASVDTFLHYAEEI

SEQ ID NO: 536 - protein, 58 aa, Artificial Sequence
  synthetic polypeptide
MAQPDSSSLAEVLDRVLDKGVVVDVYARLSLVGIEILTVEARVVAASVDTFLHYAEEI

SEQ ID NO: 537 - protein, 58 aa, Artificial Sequence
  synthetic polypeptide
MVQPDSSSLAEVLDRVLDKGVVVDVWARISLVGIEILTVEARVVAASVDTFLHYAEEI

SEQ ID NO: 538 - protein, 58 aa, Artificial Sequence
  synthetic polypeptide
MAQPDSSGLAEVLDRVLDKGVVVDVWARVSLVGIEILTVEARVVAASVDTFLHYAEEI

SEQ ID NO: 539 - protein, 58 aa, Artificial Sequence
  synthetic polypeptide
MAQPDSSSLAEVLDRVLDKGVVVDVWARISLVGIEILTVEARVVAASVDTFLHYAEEI

SEQ ID NO: 540 - protein, 61 aa, Artificial Sequence
  synthetic polypeptide
MSIQKSTDSSSLAEVIDRILDKGIVIDAFARVSLVGIEILTIEARVVIASVDTWLRYAEAV

SEQ ID NO: 541 - protein, 61 aa, Artificial Sequence
  synthetic polypeptide
MSIQKSTNSSSLAEVIDRILDKGIVIDAFARVSVVGIEILTIEARVVIASVDTWLRYAEAV

SEQ ID NO: 542 - protein, 61 aa, Artificial Sequence
  synthetic polypeptide
MAVEKTNSSSSLAEVIDRILDKGIVIDAWVRVSLVGIELLAIEARIVIASVETYLKYAEAV

SEQ ID NO: 543 - protein, 61 aa, Artificial Sequence
  synthetic polypeptide
MAVEKTNSSSSLAEVIDRILDKGIVIDAWARVSLVGIELLAIEARVVIASVETYLKYAEAV

SEQ ID NO: 544 - protein, 62 aa, Artificial Sequence
  synthetic polypeptide
MAKVQKSTDSSSLAEVVDRILDKGIVIDAWVKVSLVGIELLSIEARVVIASVETYLKYAEAI

1. A method to provide a protease sensitive gas vesicle, the method comprising
i) providing one or more engineered gas vesicles in which a gas is enclosed by a protein shell, the engineered gas vesicles comprising a gas vesicle, a GvpA/B protein and an engineered GvpC protein,
the engineered GvpC protein comprising:
multiple repeat regions within a central portion of the GvpC flanked by an N-terminal region having an N-terminus and a C-terminal region having a C-terminus, and
at least one protease recognition site inserted within the central portion and/or attached to at least one of the N-terminus and the C-terminus of the GvpC,
each of the one or more engineered gas vesicles exhibiting an initial collapse pressure and an initial ultrasound response up to collapse, the initial ultrasound response having a baseline nonlinearity,
ii) contacting the one or more engineered gas vesicles with a protease capable of binding the at least one protease recognition site to allow cleavage of the protease recognition site,
iii) following the contacting, detecting a protease induced collapse pressure and/or a protease induced ultrasound response of the one or more engineered gas vesicles; and
iv) following the detecting, selecting engineered gas vesicles having a detected protease induced collapse pressure lower than the initial collapse pressure and/or a protease induced ultrasound response having a nonlinearity enhanced with respect to the baseline nonlinearity, the selecting performed to provide the protease sensitive gas vesicles.

2. The method of claim 1, wherein the at least one protease recognition site further comprises a linker polypeptide attached at at least one of an N-terminus and the C-terminus.

3. The method of claim 1, wherein the at least one protease recognition site further comprises at least one protease recognition site inserted within the second repeat region in an N-terminus to C-terminus direction, between repeat regions, after the last repeat region before the C-terminal region and/or before the first repeat after the N-terminal region.

4. The method of claim 1, wherein the at least one protease recognition site further comprises a protease recognition site attached at the N-terminus and/or C-terminus of the engineered GvpC protein.

5. The method of claim 1, wherein the at least one protease recognition site is selected from an endoprotease recognition site, an exoprotease recognition site and a processive protease recognition site.

6. The method of claim 1, wherein the protease recognition site comprises at least one of Human Rhinovirus (HRV) 3C Protease recognition site, Enterokinase recognition site, Factor Xa recognition site, Tobacco etch virus protease (TEV protease) recognition site, Thrombin recognition site, Calpain recognition site, MMP2/recognition site, Urokinase recognition site, ClpXP recognition site, mflon recognition site, and ubiquitin recognition site.

7. The method of claim 1, wherein the engineered GvpC is selected from an engineered GvpC of Anabaena flos-aquae, an engineered GvpC of Halobacterium salinarum, an engineered GvpC of Haloferax mediterranei, an engineered GvpC of Microchaete diplosiphon, and an engineered GvpC of Nostoc sp.

8. The method of claim 1, wherein the one or more one or more engineered gas vesicles are provided by engineering a naturally occurring or a hybrid gas vesicle to add the engineered GvpC or replace an existing GvpC with the engineered GvpC.

9. The method of claim 8, wherein the naturally occurring gas vesicle is selected from a naturally occurring gas vesicle of Anabaena flos-aquae, Halobacterium salinarum, Halobacterium mediterranei, Microchaete diplosiphon Nostoc sp and Bacillus Megaterium.

10. The method of claim 8 wherein the hybrid gas vesicle is selected from
a hybrid gas vesicle encoded by a gas vesicle gene cluster comprising -gvpA, and gvpC from Anabaena flos-aquae, and gvpN, gvpF, gvpG, gvpL, gvpS, gvpK, gvpJ, and gvpU from B. megaterium,
a hybrid gas vesicle gene cluster comprising—gvpA, gvpC and gvpN from Anabaena flos-aquae, gvpF, gvpG, gvpL, gvpS, gvpK, gvpJ, and gvpU from B. megaterium.

11. The method of claim 1, wherein the providing is performed by:
engineering a GvpC protein to attach the at least one protease recognition site; and
assembling the engineered GvpC protein with other gas vesicle proteins to provide the engineered gas vesicle.

12. The method of claim 11, wherein the GvpC protein is selected from SEQ ID NO 488 to SEQ ID NO 492.

13. The method of claim 11, wherein the protease recognition site is selected from LEVLFQ/GP (SEQ ID NO 53), DDDDK/(SEQ ID NO 54), IEGR/(SEQ ID NO 55), ENLYFQ/G(SEQ ID NO 56), LVPR/GS (SEQ ID NO 57), QQEVY/GMMPRD (SEQ ID NO: 58), PLG/LAG (SEQ ID NO: 59), PQG/IAAQ (SEQ ID NO: 60), GPLGVRGY(SEQ ID NO: 61), SGR/SAG (SEQ ID NO 62) and LGGSGR/SANAILEGSG (SEQ ID NO 63).

14. The method of claim 11, wherein the protease recognition site further comprises a linker polypeptide at at least one of the N-terminus and C-terminus.

15. The method of claim 14 wherein the linker polypeptide is selected from GSGSGSG(SEQ ID NO: 64), GGGGS (SEQ ID NO: 65), GSGSG (SEQ ID NO: 66), GGGG (SEQ ID NO: 67), GGG(SEQ ID NO: 68), GG(SEQ ID NO 69), GS (SEQ ID NO: 70), GSGS(SEQ ID NO: 71), GGGS(SEQ ID NO: 72), GGS(SEQ ID NO: 73), GTS (SEQ ID NO: 74)₁ GGSGGS (SEQ ID NO: 75), GGG (SEQ ID NO: 76), GGGGGG (SEQ ID NO: 77), GGGGGGGGG (SEQ ID NO: 78), GGGGGGGGGGGG (SEQ ID NO: 79), GGGGGGGGGGGGGGG (SEQ ID NO: 80), GGS(SEQ ID NO: 81), GGSGGS(SEQ ID NO: 82), GGSGGSGGS (SEQ ID NO: 83), GGSGGSGGSGGS (SEQ ID NO: 84), GGSGGSGGSGGSGGS (SEQ ID NO: 85), GSG (SEQ ID NO: 86), GSGGSG (SEQ ID NO: 87), GSGGSGGSG(SEQ ID NO: 88), GSGGSGGSGGSG (SEQ ID NO: 89), GSGGSGGSGGSGGSG (SEQ ID NO: 90), GGGGS(SEQ ID NO: 91), GGGGSGGGGS (SEQ ID NO: 92), GGGGSGGGGSGGGGS (SEQ ID NO: 93), GGGGSGGGGSGGGGSGGGGS (SEQ ID NO: 94), GGGGSGGGGSGGGGSGGGGSGGGGS (SEQ ID NO: 95).

16. The method of claim 1, wherein the detecting is performed by using nonlinear ultrasound imaging revealing a presence of an increase in ultrasound nonlinear imaging response signal for the one or more engineered gas vesicles after exposure to the protease.

17. The method of claim 16, wherein the increase in the ultrasound imaging response signal is a maximal increase in the contrast to noise ratio among the one or more engineered Gas Vesicles between before and after exposure to the protease.

18. The method of claim 16, wherein the increase in ultrasound nonlinear imaging response signal corresponds to an increase in contrast to noise of at least 40%.

19. The method of claim 16, wherein said revealing further comprises determining a maximal increase in nonlinear signal among the one or more engineered gas vesicles between before and after exposure to the protease.

20. The method of claim 16, wherein the nonlinear ultrasound imaging comprises cross-amplitude modulation ultrasound imaging.

21. The method of claim 1, wherein the detecting is performed by measuring the acoustic collapse pressure of the one or more engineered gas vesicles and determining a greatest decrease in collapse pressure among the one or more engineered gas vesicles between before and after exposure to the protease.

22. The method of claim 21, wherein the decrease in collapse pressure corresponds to a decrease in 50% collapse pressure of at least 50%.

23. An engineered protease sensitive gas vesicle provided by the method of claim 1, the engineered protease sensitive gas vesicle comprising
a gas enclosed by a protein shell in which a gas vesicle GvpA/B protein and an engineered protease sensitive GvpC protein are arranged in a configuration in which the engineered protease sensitive GvpC protein binds the gas vesicle GvpA/B protein to form the protein shell, wherein at least one protease recognition site is presented on the protein shell of the engineered protease sensitive gas vesicle,
wherein the engineered protease sensitive gas vesicle has an initial collapse pressure, an initial ultrasound baseline line nonlinearity, a protease induced collapse pressure lower than the initial collapse pressure and a protease induced ultrasound response having an increased nonlinearity compared to the baseline nonlinearity.

24. The engineered protease sensitive gas vesicle of claim 23, wherein the engineered gas vesicle is selected from an engineered Anabaena flos-aquae Gas Vesicle, an engineered Halobacterium salinarum Gas Vesicle, and engineered Halobacterium mediterranei Gas Vesicle, an engineered Microchaete diplosiphon Gas Vesicle, an engineered Nostoc sp Gas Vesicle, an engineered Serratia Gas Vesicle, and an engineered Bacillus Megaterium Gas Vesicle.

25. An engineered protease sensitive gas vesicle protein GvpC comprising multiple repeat regions within a central portion of the GvpC flanked by an N-terminal region having an N-terminus and a C-terminal region having a C-terminus, the engineered gas vesicle protein GvpC further comprising at least one protease recognition site inserted within the central portion and/or attached to at least one of the N-terminus and the C-terminus,
wherein the central portion, the N-terminal region and the C-terminal region are configured to bind a gas vesicle GvpA/B protein of a gas vesicle to form a gas vesicle protein shell of the engineered gas vesicle of claim 23 and to present the at least one protease recognition site on the gas vesicle protein shell upon assembly and
wherein the multiple repeat region, N-terminal region, C-terminal region and protease recognition site are in a configuration associated upon assembly of the engineered protease sensitive GvpC in a gas vesicle having an initial collapse pressure, an initial ultrasound response, a protease induced collapse pressure lower than the initial collapse pressure and a protease induced ultrasound response having a higher nonlinearity than the initial ultrasound response.

26. The engineered protease sensitive gas vesicle protein GvpC of claim 25, wherein the engineered protease sensitive GvpC is selected from Anabaena flos-aquae (TEV sensitive) GvpC having sequence MISLMAKIRQEHQSIAEKVAELSLETREFLSVTTAKRQEQAEKQAQELQAFYKDLQETS QQFLSETAGSGSGSGENLYFQGSGSGSGFHKELQETSQQFLSATAQARIAQAEKQAQ ELLAFYQEVRETSQQFLSATAQARIAQAEKQAQELLAFHKELQETSQQFLSATADART AQAKEQKESLLKFRQDLFVSIFG (SEQ ID NO: 101) Anabaena flos-aquae (calpain sensitive) having sequence MGISLMAKIRQEHQSIAEKVAELSLETREFLSVTTAKRQEQAEKQAQELQAFYKDLQET SQGSGSGQQEVYGMMPRDGSGSGQAQELLAFHKELQETSQQFLSATAQARIAQAEK QAQELLAFYQEVRETSQQFLSATAQARIAQAEKQAQELLAFHKELQETSQQFLSATAD ARTAQAKEQKESLLKFRQDLFVSIFG (SEQ ID NO: 102) Anabaena flos-aquae (ClpXP sensitive) having sequence MGSGISLMAKIRQEHQSIAEKVAELSLETREFLSVTTAKRQEQAEKQAQELQAFYKDLQ ETSQQFLSETAQARIAQAEKQAQELLAFHKELQETSQQFLSATAQARIAQAEKQAQEL LAFYQEVRETSQQFLSATAQARIAQAEKQAQELLAFHKELQETSQQFLSATADARTAQ AKEQKESLLKFRQDLFVSIFGSGAANDENYALAA (SEQ ID NO: 2).

27. A protease sensitive gas vesicle gene cluster (GVGC) encoding for the protease sensitive gas vesicles of claim 23, the protease sensitive gas vesicle gene cluster (GVGC) comprising gas vesicle assembly (GVA) genes and gas vesicle structural (GVS) genes configured to form a gas vesicle type in a host cell, the GVS genes of the protease sensitive GVGC comprising a gas vesicle GvpA/B protein, a genetically engineered protease sensitive gvpC gene encoding for a protease sensitive GvpC protein, configured to bind the gas vesicle GvpA/B protein and to present the at least one protease recognition site on the gas vesicle type upon assembly.

28. A method to detect a protease and/or image a protease-associated biochemical event in a host cell comprised in an imaging target site, the method comprising:
expressing a protease sensitive gas vesicle of claim 23 in the host cell; and
imaging the target site comprising the host cell by applying an ultrasound to obtain a nonlinear ultrasound image of the target site to image the protease-associated biochemical event.

29. A system to detect a protease and/or image a protease-associated biochemical event in a host cell, the system comprising
a protease sensitive gvpC gene expression cassette encoding for the protease sensitive GvpC of claim 25,
a genetically engineered protease sensitive gas vesicle expression system (GVES) comprising the protease sensitive GvpC expression cassette, and/or a host cell,
in a combination with a device configured to apply ultrasound for simultaneous, combined or sequential use in an imaging method to detect a protease and/or image a protease associated biochemical event in a host cell.

30. A method to detect a protease and/or image a protease associated event in a target site, the method comprising:
introducing into the target site, the protease sensitive gas vesicle of claims 23 and/or an engineered protease sensitive host cell configured for expression of the protease sensitive gas vesicle of claim 23, the introducing performed under conditions resulting in presence of protease sensitive gas vesicles in a target site of the host organism; and
imaging the target site comprising the protease sensitive gas vesicle and/or the engineered protease sensitive host cell by applying ultrasound to obtain a nonlinear ultrasound image of the target site.

31. The method of claim 30, wherein the target site is a tissue or an organ within a host organism.

32. A system to detect a protease and/or image a protease associated event in a target site, the system comprising
the engineered protease sensitive gas vesicle of claim 23, and/or
an engineered protease sensitive cell configured to express the engineered protease sensitive gas vesicle,
in a combination with a device configured to apply ultrasound for simultaneous, combined or sequential use in a method to detect a protease and/or image a protease associated event in a target site.

33. A method to detect a protease and/or image a protease-associated biochemical event in a host cell comprised in an imaging target site, the method comprising:
expressing the protease sensitive gas vesicle of claim 23 in the host cell; and
imaging the target site comprising the host cell by applying ultrasound to obtain a nonlinear ultrasound image of the target site to image the protease-associated biochemical event.

34. A system to detect a protease and/or image a protease-associated biochemical event in a host cell comprised in an imaging target site, the system comprising
a protease sensitive gvpC gene expression cassette comprising a gene encoding for the protease sensitive GvpC of claim 25,
a genetically engineered protease sensitive gas vesicle expression system (GVES) comprising the protease sensitive GvpC expression cassette and/or
a host cell,
in a combination with a device configured to apply ultrasound for simultaneous, combined or sequential use in a method to detect a protease and/or image a protease-associated biochemical event in a host cell comprised in an imaging target site.

35. A method to detect a protease and/or image a protease associated event in a target site, the method comprising:
introducing into the target site the protease sensitive gas vesicle of claim 23 and/or an engineered protease-sensitive host cell configured for expression of the protease sensitive gas vesicle, the introducing performed under conditions resulting in presence of protease-sensitive gas vesicles in a target site of the host organism; and
imaging the target site comprising the protease-sensitive gas vesicle by applying ultrasound to obtain a nonlinear ultrasound image of the target site.

36. A system to detect a protease and/or image a protease associated event in a target site, the system comprising
the engineered protease sensitive Gas Vesicle of claim 25, and/or
a cell configured to comprise or express the engineered protease sensitive gas vesicle,
in combination with a device configured to apply ultrasound for simultaneous combined or sequential use in a method to detect a protease and/or image a protease associated event in a target site.

37. A method for producing and screening protease sensitive gas vesicles (GVs), the method comprising:
designing a plurality of protease sensitive GvpC;
cloning the plurality of protease sensitive GvpC;
producing GVs with the plurality of protease sensitive GvpC, creating GV and GvpC combinations;
measuring the mechanical stiffness of the GVs over a range of pressures for each of the plurality of GvpCs;
and determining which GV and GvpC combination provides a largest shift in collapse pressure based on the measuring.

38. The method of claim 34, further comprising identifying which GV and GvpC combination has a maximum nonlinear contrast to noise ratio under nonlinear ultrasound imaging.

39. A method for producing and screening protease sensitive GVs comprising:
designing a plurality of protease sensitive GvpC;
cloning the plurality of protease sensitive GvpC;
producing GVs with the plurality of protease sensitive GvpC, creating GV and GvpC combinations;
measuring the nonlinear ultrasound response over a range of pressures for each of the plurality of GvpCs;
and determining which GV and GvpC combination provides the maximum nonlinear ultrasound imaging contrast to noise ratio before and after exposure to the protease.
